United States Patent Application Publication US 2025/0051766 A1 - sequence listing, part 17

SEQ ID NO: 5065 - DNA, 58617616 bp, Homo sapiens (residues 32,565,346-34,736,368 of 58,617,616)
  source 1..58617616: mol_type = genomic DNA
aattgcagtctttgtcattacttttttttttttttttttttttttttgagatagagtctcattctgtcgcccaggctggagtgcaacagtgcgatctcggctcactgcaacctctgcctcccaggttcaagtgattctccttcctcagcctcctgagtagctggattacagacacctgtcaccacctctagctaaattttgtatttttagtacagacagggtttcgacatgttggccaggctggtcttgaactcctgacctcaagtgatccacccgtctcggcctcccaaagtgctggaattacaggcgtgagccaccgtgcccggcctttgtcattacttttgatggcaaaaactgcaattaattttgcaccaagcgaatacatgtcttgacatatcttcattaccagttgacctttggattttcactctaaaatgattctatcacaaagaaaatctttaagtttgtaatgaataatttaattgagctgggcatggtggctcacatctgtaatcctagcactttgggaggctgaggtggaaggattgcttgaggccaggagttcaagaccagcctgggcaacatagtgagggctcgtctccacaaaaaaattttaaaattagccagccatggtggcatgcacctgcagtcccagctactcgggaggctgaggtgggagaatcgactgagcccaagaattcaaggttacagtgagctatgatcgcaccactgccctccagtctgggtgacagagtaagactctgtctctaaaataataataataataataatttaattaatcttatattaattgagaatttgggtgatagtagtccattgtagcaaatacactattatttaaggagtaagggttaactttctcatgaatcaaaataattcagtacaaccccaggaagaaacagatctgtgtaaactgcagggaagacgattgagcccaggagggtacttagctcagtgccatcacacaggggaggtatagaccctctgacacagagttttgctgctctttatttccaaaatcagtcctggtcaaactgctccatgctccttgagcccagaaagtcacttgggctcccaaagacagccagggcactttagaatgccgtagcccacaggccagcccatggctatctgcatgcacccagagagcccacctagaaccactcaggaaaatgaacagtaagggcatggagacaaggcttagggttgtctaagaatcagagtgcagctttggaatacatgggaactgtctcatggctctggcgcggtttgcttactcattcccatgggaggattccagatggttagtgtgtgtatccccagcccacatggcctcccaggcgagggtcatttgctcaccacatataccacttttgctgtatccatataccatcctattctacccagaggatttttaccctcactgtgtgctggatccaattcctactggattgcaagaatcaattgttaaaatttcagaaaatgtgcaagctgtattttgttttgttttgttttgttttgttttaatttttgagacaaggtctcactctgtcacccacactggagtgcagtggcgcaacctcagctcactgcaacctccaccttctgggctctagttattctcctacctcagcctcctgagtagctgggactacaggtgcatgccaccatgcctagctaatgttttgtattttggtagagatggggttttgctatgttgctcaggctggtcttgagctcctgagctcaagcaatccacccgcctcagcctcccaaagtgctgggattacaggcatgagccatagcacctggcccataagctggtttttaaacgtagtcattattaaaaaaaaaaaaaagagagagcttataattaagtattgtgttaaaatatgaaggtactaaatacctaaagcatcattcctattttactgtgttctactcccacatttgctctgatgttacttacatctgttctgcccctatggtgggaatacaatataatgacgtgctactgtgcccaactcagctccctgttcagtgacctcacgtcggcaacctgaaattggccatggtggaagaatttacaccacagaaagcagcaaatgtgacaaatcagggtttcttttgttttgttttgtttgttccaagaaactttgttacgcatttcccaacgcactgccagatattggcatatcccttgtgggatatgtggagtgggatgaatagcagttagtctggtgaatagcaggagaccttcccagcagagtggatggtctgcacagacacttggaggtagcaaaaggcatgagccagggccagcctgagactgttaagaggacctgggtactgcccaggtgtcaaagaaaatgaggaccgagggcaggcgccatggtccgtacctataatcccaacactttgggaggtcgaggtgggaggatcgcttgaggccaggagttcgagaccagcctgggcaacaaagcgagacccccatctctacaaaagttaaaataggtcacagtggctcacacctgtaatcccagcactttaagaggctgaggtggaaggatcacttgaggccagaagttcaagacaagcctgggtaacacagcaagaccccatctctaaaaagtaaaaatatctcttgaatgaatgagtgagtgagtaatgttactagatgagaccaaagaatcgccttctcaggatgttttttgtttttttgtttgtttgttttggtttggtttggtttggtttttttgagatggagtctcggtctgtcacccacgctagagtgcagtggcacgatctcagctcactgcaacctctgcctcctgggttcacgccattctcctgcctcagccccccgagtatctgagactacaggcgcccgccaccatgcccggctaattttttgtatttttagtagaaacagggtttcaccatattagccaggatggtctcgatctcctgacctcatgatccgcccgcctcagcctcccaaagtgctgggattacaggcatgagccaccgcgcccggccaggatgtttttaaggacaggtgaaagtcctcctaattttatttgaggagaggaaggtcttcctcatctcctttgaggttggttctctttggatgaggcaggtggaggctacgatgaaatttcatcttggcccccaatcatacaggacccctgtcggcatcaagttccccagaattaagacccagaactgagagttatcccaaggcccatggggtcataaacagccaggaatgaaaaaaaatttattggtgccaaactgtagagaaaaaaaatgcaaagtcaagatgaatacacttgatgaaactcaaattgaagcccttgtgttatcatttattatttatatatatgcattatattggatgtggaatggggtgcatttctgtatatttaacgttttatgtaatgggtgctccaaaactaaaggagcccaggaggctcttaaaatagcccgcttcctgttagccagcaaactttcatgtcttttcctttcttttcttttcttttttttttttttctgagacaggatgtcactctgtctcccaggctggtgtgcagtggcacaatcatagctcactgcagccttgaactcctgggcacaccacaattcctggcttattttttaatttttttgcagagacggggggggtgggtctcattatgttgcctaggctggtctcgaactcttggcttcaagcaatcctgtcatttcagcctcccaagtagctgggactacagatgcaagccactgcccagcttatttattattgtgacagagtctcactctgttgctcaggctggagagcagaggcatgatcatagccactgcagcctcaacctcttgggctcaagggatcctcctgcctcagcctccttgaatagctgggactacaggcacataccaccatgcctaatttttttttatttttttgtgcagacaagggtctctctatgttgcccaggctggtcttgaactcttggcctcaagcaatcctcctgcttcagccccctaagtgctgggattacaggtgcgagccaccatgcacagccagtctgtggctttctagccatgacaaggaagtcctgacgagataatatagccatctcctcaccctcctgtatggccatctcatggtgaagaaagctgttatcccagcaagtggccacaaaagcttggacggagctccttctcaagtaaaagactataactagttttcaatgagaagctttctttttctttttcttttcttttttttttttttttttttgagacagagtcttgctctgtcacccaggctggagtgtacagtggcgcgcgatcttggctcactgcaacctccccccttccagtttcaagtgatcctcctgcctcagcctcccgagtagctgggactacaggcacccaccaccacactctgctatttttgtattttttttagtagagatggggtttcaccatgttggccaggctggtctcgaactcctgatctcaggtgatccgcccccctcggcctcccaaagagctgggattataagcatgagccactgcacccggccagatttattttttaatggaccacactctgcttctgctccttgcatttcagtgagttccacggcaccgtttccatgatatcacgactgatccatgcaggatcacggctaataaatggctctaaaacaacctgtgaagacataaccattaagtgtgccaggtaccaatctgcaattccacatgctgcacatacagctctgaagcgcacgctccccacaagcccgccgtggctttctcagaggatcgggcatatggaaccataatggagcataaatttacagcaacagagatggacgagggagattaaagcttcatctgtaaggacatactgcatggcaaaaaaaaaaaaaagaaaaaagaaagaaagaaaaaagaaaacaacagttattgtagtttctgctttgtagtataatgagaaactcagtcgcttttgatagagtgtgggctccctctgctgcttgcaggagacaccaggactccgggcatttggggttccttggagatcagcgcagaggaggtggcctgaagtgggaagagaaagatggggctgagcgttgcagacggaccgactggttctgcaggctctgaccctgtgggcttctcagagtaattatgctgctgctgcaccaagaagcaagaaatggaaataacagaaaaacgcaaagaaactgtaagatgcactggccagatcacctgtgtgcacagaggaatgcatcacggaagcaatgcagcctgcccagagcagcttctccttccctccctccctcccttcctgtttaaatttttgcagagatggggtctcgttatgttgcccaggctggtctggaactcctggcttaaagcaatcctcccgcctcagcctctcgagtagctgggactacaagtgcaagccactgctcttccttccttccttccttccttctttcccttcctcccttcctttcttctcctttcgtccctccctcccttccttccttttccctccatccctgcctccctccttccctcccttcctacctaccaaccttccttccttcctccttccttgtttcctccctccttccctccctccctcattcatttcccagtcacaaggtaggactgcacttccccacccgctttgatgttaggcatagtcacatgattcactttggccaacacaatataaagaaaaatgatgggtatcatctctggctggaaacttaaagggacaggtcgggtgcggtggctcatggctgtaatcctagcactttgggaggccaaggcgggtggatgacttgaggtcaggagttcgagaccagcctggccaacatggtgaaaccccatctctactaaaaatacaaaaattagctgggtgcagtgacacgtgcctgtaatcccagctactcaggaggctgaggcaggagaatcgcttgaacccaggaggcagaggatgcagtgagctgagattgagaggtgacagcatgctggcagtcctcagagccctcgcttgctctcggagcctcctctgcctgggttcccactttggcggcacttgaggggcccttcggcccgccgctgcactgtgagagcccctttctgggctggccaaggccagagccagctccctcagtttgcagggaggtgtggagggagaggcgcgagcaggaaccggggctgcgcgcagcgcttgcgggccagctggagttctgggtgggcgtgggcttggcgggccccgcactcggagcagccggccagccctgccggccccgggcaatgagggacttagcacccgggccagtggctgcggagggtgtactgggtcccccagcagtgccggcccaccggcgcggtgctcgggacctgcagtcttagctgccttcccacggggcagggctcgggacctgcagcctgccatgtctgagcctcccaccccctccatgggctcctgtgagcccgagtctcccggacgagcaccacccactgctccagggcgcccagtcccatcgaccacccaagggctgaggaatgtgagcgcacagcgcaggactggcaggcagctccacctgcagccccggtgagggatccactgggtgaagccagctgggctcctgagtctggtggggacgtggagagtctttatatctagctcagggattgtaaatacaccaatcagcaccctgtgtttagctcaaggtttgtgagtgcaccaatcgacactctgtatctggctgctctggtgaggacgtggagaacttttatgtctagctcagggattgtaaatacaccaatcggcactctgtatctagctcaaggtttgtaaacacaccaatcagcaccctgtgtttagctcaaggattgtaaatacaccaatcggcactctgtatctagctcaaggtttgtaaacacaccaatcagcaccctgtgtttagctcaaggattgtaaatacaccaatcggcactctgtatctagctcaaggtttgtaaacacaccaatcagcaccctgtgtttagctcaaggtttgtgaatgcaccaatcgacactctgtatctagctgctctggtggggccttggagaacctgtgtgttgaaactctgtatctaactaatctgatggggacgtggagaacctttgtatctagctcagggattgtaaacgcaccaatcagcgccctgacaaaacaggccagtcagctctaccaatcagcaggatgtgggtggggccagataagagaataaaagcaggctgcccgagccagcattggcaacccgctggagtccccttccacagtgtggaagctttgttcttttgctctttgcaataaattttgctactgctcactctttgggttcacgctgcttttatgagctgtaacactcaccgcgaagatctgcagcttcactcctgagcctggcgagaccacgagcccacggggaggaatgaacaactccagactcactgccttaagagctgtaacacataccgcaaaggtctgcagcttcactcctgagccagcgagaccacaaacccaccagaaggaagaaactccgaacacatctgaacatcagaagagacagactccagacgcgccaccttaagagctgtaacactcaccgcgagggtccgcggcttcattcttgaagtcagtgagaccaagaacccaccaattccggacacaagatcacaccactgcactccagcctgggtgacagacaagattccgtctccaattaaaaaaaaaaaaatttaaagggacagtgtgcagttcactaggttatctcttccctggtacttggtagcattgagatgacagctgctctgtcagcctaggtctcagagtgagaaaatgaggtaggaggcagaacagactccagagtcggggcttggacaccagaccagattgaagactagctaaaacagggatgtgctggaagctcctttccataagacacgtccaccagtgcgtcatgtcagtttaccacttccatggcaacacccaaaaattactgcccctttccatggcaatgacccaacaacctggaagttaccaccccttttctagaaatttctgcataatctgccccttgatttacatataattaaaagtgagtctaaatgtggctgcagcactgcttctgagctgctcctccaggcacactgcctgtggggtggtcctgctccgcaaggaacggcccctctgctgctgctgctgtgcatgagtgcttcaagagaagttgctatccgacaccaccagcttgtcctggaattctctcctgggcaaagccaagaaaccctcccaggcttagccccaattctggggcctgtcctgctaaggaagaagggagggtgaaagaaagaaagaaatgtgtaattagtttgttagggatgccatataaaactaccacaaactgagtggcttagaacaaaagaaaattgctggccatgcagaaagaagtactgcagtagctgatgataataattttcctttctgaaaatatcaggctgggcatgctggcttgtgcctgtaatcccagcagggatttgggagggattcgggaggccaaagtgggaggaaggtttgaggccaggagtttgagagcagcctgggcaacacggcaagaccccatctctgcaaaatgtttagagagctggacatgatggtgcgcacctgtagtcccaactcctagggaggccaaggcaggaggatcacttgagcccaggagtttagagttcagccttggcaacagagtgagaccccatcttttttaaaaaaaaaatattgtctcacagttctggaggctggaagtgtggtatcaaggtgtcagcggggccatactccctctgaaacctgtaggaagaggctccttccccatctcttcctagctacttgtggtttgctggtaatctctggcactccttggcttatagatacatcattccaatcatgttcatcttcccctgtgcatgtctgtctctgcatccaaattttcccaatttccctccctcccctcatcccccacctttctttcttttttttttttttttttttggtctgagacacagtctcactctgttgcccaggctagagtgcagtggcacaatcttggctcactgcaacctctgcctcctgagttcaagtgaatctcctgcctcagtctcccgagtagttgggattacaggtgtgcgccactatgcctggctaatttttgtatttttagtagaaacagggtttcaccatgttggccaggctggtctcgaactcctgacctcaggtgatccgccctccttggcctcccaaagtgctgcgattacaggcgtgagcaaccgtgcttggaccaaatatcccctttatataaggacaccagtcatactggattagggctcacccccaatgacctcattctaacttgattacttttgtaaagaccctatttccaaggtcacattctaagatactgggggtaaggacttcaacgtgtctttttgcagggacataattccacttataacagcaggttcacagagctcagcctttcagctggcttcttaccagtcaataaacccacccatacacttggagttcctaatcaaatctttcttgctttctccttaaaaatgaacaggttaggccgggcgtggaggctcacacctgtaatccccaggactttgggaggccaagacgggtggatcacctgaggccaggagttcaagaccagcctggccaatccagtgaagcccatctctactaaagatacaaaaattagccgactgtggtggtgcccacctgttgtcccagctactggggaggctgaggcaggagaatcacttgaaccgggaaggcagaggttgcagtgagccaagattgcaccactgcactccagcttgggcaacagagcgagactccattccccaccccccgcccaaaaaaatgaacaggctaatcaaggaccaccaactatctaatgacagcctatggcatgtgggagagactataataaccatgttttcttattttaaaattttagatacaggggtccacgtgcaggtttgttacacaggtgtattgcatgatgctgaggtttgggcttctattgatcctgttacctatataatgaacatagtacccaacagagagttcttcaactattcccctcctccctccgtctcactgtcagagtccgcagtgtctgttgtttccatctttatgtccacgtgcacccgagatttagctcccacttataagtgagaacatgcaatttttggttttctgttctgtgttaatttgcctaggataaaggcctccagctgcatccatgttgctgcaaagaacataatttctttcttttttatgactgcatagtattccatggtatctatgcaccatgcattttctagtttctgtttttgatgctctgacatcttggggccttgctgaccctggagggatggtccctcccagggctagccacatcctaaagatagtaagtgactctcctgtgagcacagctttcagatgcacaccagccaatccagaagtcattccccaaccacctccgtttcagggccctcacagggctgttacactcagggcaactatttctctgccctagtcaccccagggcccagtaccagactattagaagcagagcccacaaaaattactcaaactagccaatcctgagcctgcgtatctgcctcacctgttccttctcacagaactcacaaaaaaggctctcgtccacttttaccctcttccctctgcctcgtgactgcccctggcccctgtgtggtgtgccctgcctcctgtttctggcggtctgtgaatctaagctttttccttcatgaccgtcaattccgtgcctgtatgtcttcgcatatctaatttaaacaaatcctgggtacccttacaacagaggccaagaaaaataatcaggtataaaaacaacctgaaaagaaagaggactaactcaggaaatgaaagaggatgtttaattggtttccaattattattataacaatatttaagaagttattacactcaaaaatcaagaacaagatagtacgcaaacagcatgataatgctgcataaacagagtaaggagaataagtaaataaataaatttttaaacggtgcaataagggaacaagaaagtgttcttataaaataaaaatataatggcttaaataaattcaagagaaaggtcagatgataaaacagaagaagccttccataaagtaggacaaaaagaccgagatggaagacatgaaagaaaagggatatgaaagatttatccaggaggcccagtttacagttgtcccagatagagaaagatagaaatcaaagaggaaaaaagtatcaaatggacaacaaaacaaaattgcccaaaagttaaaggtagaagtttccagatcaaaagaatctaccaagcaaacaggacaagggcttttaaaaggcccaaacctttgcaaaatttcagaatcctgggaggaaaaggaaagattctaaaacttttctttctcttctttttctttctctttctttccttccctccttccttcttcctttcccattccccttccccttccccttttcttcccctccctccctctgtctctctctctctctctcactctctctctctctctctctctctttctctctttcggggctcactctcacccaggaaaattcctaggctcaagcaattcccacctcagcttcccaagtggctgggactacaggtatgcaccaccatgccctaatttttaagttgttgtagagagagggttctcactaggctcatcatgttgcccaggctggtctctaactcccagcctcaagcgatcctcccacctcagcctcccaaagtcctgggattacagctgtgagtcatcacacttgaccaaaagctttcagaaagagaaaaaaaaaaaacaccactcacgaaggaataggaatcagatttttgtatcacgaacaccaaatgctagaagacagatgagatgtacctttatactccaaagggagtggacactaaacacaactggatcacgaactgacaagaaaacaaacagtggtggtgaaggttatttgaataactggagagacaaatgtgggctacatcaagtagatgatactattttatctatattaatgtattgggtacaataattatattatatatgagtatatctttgttcttaggatatacacttaggagtgaactgacatatttgaaaccttcaaatggttcaaaaaaactgtgtgtgtgtgtgtgcatatgcacacacgtatgtatgtgtgtgtagacatataaagtcaatgtggcaaacttaatgattaatgaatgtatgggaaagatatatacacgttctttgtactattcctccaatttttatagatttgatggttttcacaatgtaaagtaaggaattttacaaattactaatatataacaaagttagaagggtaaattaaaaataacattttgtattatattttaatttaaagtaattctgaggggaaaatattttatccaaaagtctataaccaaccatgaattagtcaagtgttatggtcaattaaatatttagacatatgacaatatagaaaatttgtctatcacagactttttaaagacaattacttaaaaatgtgtttcaacaaacttaagggttaaaccaagaaagagcataaggaatccaagaaatagaggatgaaactcaagatggcaaggaaggaaaatctaggataagaggtatgcaacagtccccaccattcagtggggaaaggacagtcttttcaacaaatggtgctgggaaaactggatagccacatgcaaaaacatgaagtgggacccttacctaatgccatattaactcaaaatggaccacagacctgaacataatgagctaaaactatagaacttctagaaggaaacaggagaatagcttcataacgttagatttggcagttatttcttgggtatgacaccaaaagcaaaggcaacaaaagaaaaaataggtaagttggactttatgaaaattaaaatattttgtgcattgaaggacacaatcaacagaatgtaaatcccatggaatgggagaaaatagttgcaaatcatatactttgataagggattatctaaaatatgtaaagaactactacaacgcaacaacaaaaaaagaaaagcaaattttaaaatgggcaaagggctagaagagacatttttcttttcttttcttttcttttcttttttttcttgagacagagtctcgctctgtcaccaggctggagtccagtggcgcgatcttggctcactgcaacttccggctcccgggttcaagtgattctcctgcctcagcctcctgagtagctgggactacaggtgcgtgccaccacgcccagctaatttttgtatttttagtagagacagggtttcgccatgttggccaggatagtctcaatctcttgacctagtgatctgccctcctcagcctcccaaagtgctgggattacaggagtaagccatcgcacctggcctagagtagacatttctctaaagaagatatacaaatggccaacaagcacatgaaaagatgctcaacatcactaatcgttagagaaatgcatatcaaaaccacaacacctcacctcatacccgttaggatggttactatcaaaaacaatcaaaaaacaaacaaacaaaaaaacagaacacaacaaatattggtgaggagacggtgaaattggaaccttcattcactgttggttggaatgtaaaatagtgcagttgctgtggaaaatggtatggccattcctcaacacagaattatcacattatccaacaatttctcttctgggtatatatccaaaagtgaaagcacagacctgaacagatatttctacacccatgttcatagctgcattattaataatagccaaaaggtggatgcaacctaagtgtccattgtcagatgaatggataaacaaaatgtgctaggtatatccatacaatggaatatattcagtctaaagagggaaagaaattctgccacatgctacaacatgaatgaacctttaagacatatgctaggtggagtaagccagtcacaaaaggacaaatattgtatgattccacatatacaagatacccagaataggcaaattcatagaaactagaatgagaatgggtggagactgattattattctcagacccctcccacccccacccattcccattagaggcccctcacaccaacctaaatctttactgggtagagttccagttcaggatgataaaaaaaaaaagttgtagagattgatggtggacaaggtggttcatgcctgtaatcccagcactttgggagaccaaggcaggtggatcactttaggtcagaagttcgagaccagcttgaccaacatggtgaaaccccatctctactaaaaaatacaaaattagccgggcacagtggtgcacgcctgtggtcccagctacttgggagactgatgcaggagaatcgcttgaacccgggaggtggaggttgcagtgagctgagattgagtgacaactgcacgataatgcatttcataccactgaaaagtacacctaaaaatggtgaaaatggtaaattttgtattgtgtatattttgccacaattaaaacacacaggccaggtgtggtggctcatgcctgtaatgttagcagtttgggaggctgaggcaaaaggattgcttgagctcaggagatagaggccagcctaggcaacatagcgagaccccatctgtatttttttaatgtaaaaaataaaataacacacacacagacaaacaaacagaatctgtatgagtcacacgtttaggtagctgaatatcctctctgcccccaattcccccaagtcaaaggcagaagggatttgttccaccaaagagtttacaccagccacagctgcccactgcagtatcctcccaggaaaagcccttttgtgcgtggaggaggcagatggcgaggaggcagatgtgcactttttttttttttttttttttttttagagacagggtctggctgtgtctcccaggctggagtgcagtggcgagatcaaggctcactgcagcctcgaacttccgggctccagcgatcctcctgacacagcctcctgagtagctgggactacaggtgcacatcaccgcgcccaactagttttttaaaattttagtagagataggctcttgccatattgcccaggctggtctctaactcctgacctcaaatgaccctaccgcctcccgaagcgtcgggaccacaggcggcgagccaccggccggcctctgtgtgcaccgaggagccgggcagccaccgccacgatccagctttaggacatttccatcaccccactcagccttcctgcgcccctggttcctcatctataaatagagataatatacgcctaaccctctaggtcaccagcacattgcacccataattattatacttgttgatgccacactttcaggttttaacctttccaaagcgcagccccgccccagcgcagcccaagtccctgcacgcagaggcgccgatcacgggtgggaggtggatcccggaggccccgccccaggccccgcccctccgtgcgcccaagctcgaccgcctgaaatcggggaatcgggcctctgccggcgccctggcagcggcgcggggcgtggctccgggctggattggtggcgcctgggccccgcgagcgcctgcgcagtggtcaaggccgcgctcgcgccgaggggctgcgagagtgaccgcggctgctccagcgctgacgccgagccatggcggacgaggagcttgaggcgctgaggagacagaggctggccgagctgcaggccaaacacggggtgagcgcatcagcccccgccaggcttggccctcgcggggcgccgccctcgcccggagtgtagggcgcgcctccggggcggaggctctgggcgcctccccggggccccggtcccctgcgctgccctggcggcctcgtggccggctcagaggtggcctcgtcgctttcctcgtcgcgaggggcccaggaggctggcggcgggggccgccacgtgcgggacctgccctggcgttggggtgtggggtcccctagcctggagcgggctcgtcctggcgggcctggatccaagcacaatctcagcttttggagccagcagccggaccgaattcagtttttccggagttcagttgttatgacccaagtttagccgacaggtattgagggtccgctgtgttcccggtgctgagagcgcggcagggtcggaggaacgcttgccccgccgggatgacagggaggggccgcctgggaagcttggatggatcacacgcccggagaggcgtttctgataagggaccgggaccttagggacggagggcgcagtctttgagttatcgttgtccctaataccgaggcccgttttattttccagaaattattcctacatgtgaaacacggtttcgtaatacagggattcccctccccagggtgctctgtattccaaagccttctgaggttgtggttttagacgttcatcaaaacgttgtaagtgggaactagttcattgatttctgtgaggcccagtttcttatttggggagttgtttctaccaccgcaagagactgttatgtataggaaacaacagaaccgttcctttttcccgccgcctcccgtgaaatttctctattaaatttaagttttttttttccaggatcctggtgatgcggcccaacaggaagcaaagcacaggtatgggctggaaacgtgaactttttgaagggtggtttcaccaaatggatttcttttgctgtagttattttaagcaggtgtgtgactcagatttttttgttttgctggaatggtgatttggccaaaatcatccgcagggtatcttcattattgttaaataaacacgtgtgcagctccacatcagaccttgtattgcaattactggttgatgtttctctgctacaatgtgagtaccttaaaaatgagcctgataataggcagctgtggcagtttcctcggctgtgggggtgacgtgagtccggtgcctcacttagtaagtgctcaataagtgttaactggtaagctattctgattgttttatcccaacacagcgcacagcacctgagacagatgcaggtaattgattcggtggcaggtttattgaatgagtatgtgattaccctatcatgctatcattttttaaaaattgtggttaaataaaatttcaccatcacaaccatttttaagtgtgctcttcagtagtgttcacactctagaatgttttcatcttgcaagactgaaacctttagctactggacaattctctatttccccttcctcaccttcttactcctcctctccagcaaatatttatagagcacctgctctgggtcaggcactgtgctgggtctacagaaataggaagggagggttcgggagaagacagacggtgagaagtatctggagtagtgataggaagtaaaacgacgcaaatttcattgatttctgccgtgtacatcttttcattgtcacatatctgaaatcaggatgccttttaaaacagattgctcttgccccagattcttccagaggggatttacttttgactctgctatcacttgagtacatttctgagaccattgaaagttaaattctctgcttgaggttttcccctgcctcctgcctagtagtgtgaattcagacagcaaccctgtaagactgaacttttttcttctttacgtcagggccaggtgcatgcaagcttttgtactgccccttactgcatggcatatttatttattctttactttgtactgagaatgttgctctttgataccccagtggtgggatcagaactcactgcagcctcaaactcctgctgggctcaagtgatcctcccacctcagcctcctgaggagctgagatgacaggcgtgcaccaccatgcctggctaatttttttaaactttttttttttttaatagcctcgctatatcacccaggctggtctcaaactcctggcttcaagtgatcctcccaccttggcctcccgagaaaccccagttttgaatggagatctctattagacctctcattttagggtttttcatttttagagatacgtaaaactatggtgtatcttagaattgatggcatcttagggttctgtgatataatagtttgtggcaggccaggtgtggtgactgaagcctgtagacccagctactcaggaggccgagggggaagaatcacttgagcacaggagcttgagctgatcatagctgcagtgagctgtgattgcaccactgtactccagcatgaacagcagagtgagaccccatctttttttattgttgttgagatgaagtctcactccatcacccaggctggagtgcagtggcacaatcttggctcaccgtaacctctgcctctgagcttcaagcgattctcctgcctctgcctcccaagtagctgggattacaggcacccgccaccatgcccggctaatttttgtatttttagtagagatggggtttcaccatgttggccaggctggtctcaaactcctgacctcaagtgatccacccacctcagcctcccaaagtgctgagattacaggcatgagccaccatgcctggcctagaccccatctcttaaagtttgtggcagggctgcagtactcaaaccataaagaagtggcctatggaaatgagctttaagccacattccatgaaccgaagggcctctgagctgggagtggatagtgggcacagccagccccagctctccctctcagttgagccaaagcatctgtgctcatttgtttttagatttcttaaaggatttcatttgaaagaaaaaagaaacaagtccatgagaccactgtcctgtgaacgtgaactactttctatttgggtaggtaggaagaagtgaggatagttgcaaagttataatttcattccccttccccacccagaaaaatagaactgagagtcttaaaacatggaatctggctgtagcttggccacagttacctatgtctctttagcatagcctcctggatctcagctttatctctaagaaaatgatatagattagtcacatggtccttctaattgcctgaaatcccactataaatttctagcacctgtcacgcaataggtacttaagaaatgttggtgatggtgtttgaactgaggctccactctgatgaaactgtaaagctcaccttccagcctggtaggttgtcacctgtgtaatataaagctggttctttgagggcaaaaggggattctacttgaatgtagctgcagccttatgtacagcaactaccataatgcagtttgtataccgcaggccccatgtggagacacatactggatgggttctttctcgtatgttacatgggaatgccgacagctgtgttttaattgtgtttgacctatgttttcgttgtagggaagcagaaatgagaaacagtatcttagcccaagttctggatcagtcggcccgggccaggtgtaagcatctttgatttcatttccataaagttagcttgagttagttgaatggggtgattagataccattattgctatcactagatgaaatatttgcttaggctgaaaacacttgagatgtgtaagaagtgtgaagtttataaacctagagaactgtactttaatccctagtaaaagtaccaggtcacttctcttaccaagatgttctccaggtgtgtattaggtaagatttataggaaacaactcatagggccaatcacaaaatgttgctggtagttgacattttgtgtcaactggtgatggggactggggatgggggacttaggggctttttatatgtattgtcagttttagtgtatgttcagagttgttcatcataaaaaccaaaacctgtagaaagaaaaaatgagacagtcagaatgaactggtattttctgtattttaactggaagcccagtttgagtgtagaaaaggcggccacaggtggatcaccaccattatgtgtaatagataaaccgctttccagagggcagtcatatattttaagaaacaggaagcatggtgcttagaatctgagaacccaactttaatcttggctgggccactacccccatgtgcccatgtggagattggcatgggtgaacttcagttttctcatttttaagaggagtaacaatactgtcttgccctacactgagggacaagcttgtgaagtgctttggaaaggtcaatgcatagttttaaggtataacataagtgcatttgattttaatggattttttgcatatgtattttttctttttagtaagtaacttagcacttgtaaagcctgaaaaaactaaagcagtagagaattaccttatacagatggcaagatatggacaactaagtgagaaggtaagcttagacagccttgaggaactttactgttacctgctttatcaaaacatggcttcaaaaggtcagctgcatcttcactggattacagaattcttgctgactctcagaagaaattgttggagagaatagtcatacctactttaaaagagaataaattgcctttcctaaattcctctgcttcgctcctttcctggcgttgctctggaaccttgttggtgtctgtgacccaatgactgttagggtcagctagcttcaattgcccctgcactggaagcaaggtttgtcagtaacaccaattaaaatactaccagtgtaagtagaaggtgtgttttgcagatgagaaggtgctaagatgccttgcttatgttctctgtgttgctgtaataccatgaggggtatgttgtggcaaacctggcctttgagatcaagacgaaccccacctgccctgagaagccgtctgctaccaccacagcctacccgaattggtcctgtcccctaaacccctcacactgagaactgcttgtgtgggagagagctggttgggttgatcttttccgagtgtgacttacctccttcaaggggatgtttaagcttctcgggcagaagtggtgtgtctattcctgacaccaaacaccgtggtatatgtggttgtcacactcagctagtgatgataaaggtgttcttaaatatgttagctttcagttttcctgaggaagcaattttatggatacttccccctccttctcaagtgaggaatagcagagcaaattttatttggaacttaaaccaatagttataaccaatagtttcaacctcctgcctcaccactgcttccttcctgagctctttccccacacctcaaaaagagtacaaagtgattccatctgcagaggtaaattctttgtttaaaaaagtactgtttttcttatcttttctggttctcctaggtatcagaacaaggtttaatagaaatccttaaaaaagtaagccaacaaacagaaaagacaacaacagtgaaagtaagtgtccccagatgcttgtggcaaatgaaaagatggatactttaaagattaatgttgagtatacatctaccacacatatttttcagcccagagacattttccttttgtcaaacacgtgaaagtttggggagaaaggctgaatctgttgggggagggttctaatttttataggctcttgactccattcccacccttttagttcacgctaagttgctttaaagacacaaatgtcttgctaaaattggtagaaatcttttctcggaaaatctgagttatgctttattagaaatgttctgacactcatttaattttcctcccagttcaacagaagaaaagtaatggactctgatgaagatgacgattattgaactacaagtgctcacagactagaacttaacggaacaagtctaggacagaagttaagatctgattatttactttgtttattgtctatatgccttttaaaaaaataaacttgttatgcaaaataaaacatttgggtaagttgttttagtatcatagccaagtggccagatctgtgttttgaatttttccccttcctaccaaaagctttttttatttttatttttgttattatactttaagttttagggtacatgtgcacaatgtgcaggttagttacatatgtatacatgtgccatgctggtgcgctgcacccactaacttgtcatctagcattaggtatatctcccaatgctatccctcccccctccccccaccccacaagagtccccagagtgtgatgttccccttcctgtgtccatgtgttctcattgttcagttcccacctatgagtgagaatatgcggtgtttggttttttgttcttgcgatagtttactgagaatgatgatttccaatttcatccatgtccctacaaaggacatgaactcatcattttttatggctgcatagtattccatggtgtatatgtgccacattttcttaatccagtctatcattgtgggacatttgggttggttccaagtcttcgctattgtgaatagtgccgcaataaacatacatgtgcatgtgtctatatagcagcatgatttatagtcctttgggtatatacccagtaatgggatggctgggtcaaatggtatttctagttctagatccctgaggaattgccacactgacttccacaatggtcgaactagtttacagtcccaccaacagtgtaatagtgttcctatttctccacatcctctccagcacctgttgtttcctgactttttaatgattgctattctaaccggtgtgagatgatatctcattgtggttttgatttgcatttctctgatggccagtgatggtcagcattttttcatgtgttttttggctgcataaatgtcttcttttgagaagtgtctgttcatgtccttcgcccactttttgatggggttgtttgtttttttcttgtaaatttgttggagttcactgtagattgtggatattagccctttgtcagatgagtaggttgtgaaaattttctcccattttgtgggttgcccgttcactctgatggtagtttcttttgctgtgcagaagctctttagtttaattagatcccatttgtcaattttggcttttgttgccattgcttttggtgttttagacatgaagtccttgcccatgcctatgtcctgaatggtaatgcctaggttttcttctaggatttttatggttttaggtctaacgtttaagtctttaatccatcttgaattgatttttgtataaggtgtaaggaagggatccagtttcagctttttacatatggctagccagttttcccagcaccatttattaaatagggaatcctttccccattgcttgtttttctcaggtttgtcaaagatcaaatagttgtagatatgcgtcattatttctgagggctctgttctgttccattgatctatatctctgttttggtaccagtaccatgctgttttggttactgtagccttgtagtatagtttgaagtcaggtagcgtgatgcctccagctttgttcttttggcttaggattgacttggcgatgcaggctcttttttggttccatatgaattttgaagtagttttttccaattctgtgaagaaagtcattggtagcttgatggggatggcattgaatctataaattaccttgggcagtatggccattttcacaatattgattcttcctacccatgagcatggaatgttcttccatttctttgtatcctcttttatttcattgagcagtggtttgtagttctccttgaagaggtccttcacgtcccttgtaaggtggattcctaggtatttgattctctttgaagcaattgtgaatgggagttcactcatgatttggctgtttgtctgttattggtgtataagaatgcctgtgatttttgcacattgattttgtatcctgagactttgctgaagttgtttatcagcttaaggagattttgggctgagacagtggggttttctagatatacaatcatgtcatctgcaaacagggacaatttgacttcctcttttcctaaatgaatatcttttatttccttctcctgcctaattgccctggccagaacttccaacactatgttgaataggagtggtgagagagggcacccctgtcttgtgccagttttcaaagggaatgcttccagtttttgcccattcagtatgatattggctgtgggtgtgtcatagatagctcttattattttgagatacatcccatcagtacctaatttattgagagtttttagcatgaagggttgttgaattttgtcaaaggccttttctgcatctattgagataatcatgtggtttttgtctttggttctgtttatatgctggattacatttattgatttgcgaatgttgaaccagccttgcatcccagggatgaagcccacttgatcatggtggataagctttttgatgtgctgctggattcggtttgccagtattttattgaggatttttgcatcaatgttcatcaaggatattggtctaaaattctccttttttggttgtgtctctgccaggctttggtatcaggatgatgctggcctcataaaatgagttagggaggattccctctttttctattgattggaatagtttcagaaggaatggtaccagttcctccttgtacctctggtagaattcggctgtgaatccatctggtcctggactctttggttggtaagctgttgattattgccacaatttcagctcctgttattggtctattcagagattcaacttcttcctggtttagtcttgggagagtgtatgtgtcgaggaatttatccatttcttctagattttctagtttatttgcgtagaggtgtttgtagtattctctgatggtagtttgtatttctgtgggatcggtggtgatatcccctttatcattttttattgtgtctatttgattcttatctctttttttctttattagtcttgctagcagtctatcaattttgttgaccctttcaaaaaaccagctcctggattcattaattttttgaagggttttttgtgtctctctttccttcagttctgctctgattttagttatttcttgccttctgctagcttttgaatgtgtttgctcttgcttttctagttcttttaattgtgatgttagggtgtcaattttggatctttcctgctttctcttgtgggcatttagtgctataaatttccctctacacactgctttgaatgtgtcccagagattctggtatgttgtgtctttgttctcattggtttcaaagaacatctttatttctgccttcatttagttatgtacccagtagtcattcaggagcaggttgttcagtttccatgtagttgagctgttttgaatgagtttcttaatcctgagttctagtttgattgcactgtggtctgagagatagtttcttataatttctgttcttttacatttgctgaggagagcttccaactatgtggtcaattttggaatcggtgtggtgctgaaaaaaatgtatattctgttgatttggggtggagagttctgtagatgtctattaggtccacttggtgcagagctgagttcaattcctgggtatccttgttaactttccgtctcattgatctgtctaatgttgacagtggggtgttaaagtctcccattattaatgtgttgggagtctaagtctctttgtaggtcactcaggacttgctttatgaatctgggtgctcctgtattgggtgcatatatatttaggatagttagctcttcttgttgaattgatccctttaccattatgtaatggcctctttgtctcttttgatctttgttggtttaaagtctgttttatcagagactaggattgcaacccctgccttttttgttttccatttgcttggtagatcttcctccatccttttattttgagcctatgtgtgtctctgcatgtgagatgggtttcctgaatacagcacactgatgggtcttgactctttatccaatttgccagtctgtgtcttttaattggagcatttagtccatttacatttaaagttaatattgttatgtgtgaatttgatcctgtcattatgatgttagctggttattttgctcattagttgatgcagtttcttcctagtcttgatggtctttacattttggcatgattttgcagtggctggtaccggttgttcctttccatgtttagtgcttccttcaggagctcttttagggcaggcctggtggtgacaaaatctctcagcatttgcttgtctgtaaagtgttttatttctccttcacttatgaagcttaatttggctggatatgaaattctgggttgaaaattcttttctttaagaatgttgaatattggcccccactctcttctggcttgtagagtttctgccgagagatccgctgttagtctcatgggcttccctttgtgggtaacctgacctttctctctggctgcccttaacattttttccttcatttcaactttggtgaatctgacaattttgtgtcttggagttgctcttctcgaggagtatctttgtggcgttctctgtatttcctgaatctgaatgttggcctgccttgctagattggggaagttctcctggataatatcctgcagtgttttccaacttggttccattctccccatcactttcaggtacaccaatcagacgtagatttggtcttttcacatagtcccatatttcttggaggctttattcattttattttttctctaaacttcccttcttgcttcatttcattcatttcatcttctatcgctgataccctttcttccagttgatcgcatcggctcctgaggcttctgcattcttcacgtagttcttgagccttggctttcggctccatcagctcctttaagcacttctctgtattggttattctagttatacattcgtctgaatttttttcaaagtttttaacttctttgcctttggtttgaatttcctcctgtagctcgtagtttgatcgtctgaagtcttcttctctcagctcatcaaagtcattctccgtccagctttgttccattgctggtgaggaactgcgttcctttggaggaggagaggcgctctgctttttagagtttccagttttctgctctgttttttccccatctttgtggttttatctacttttggtctttgatgatggtgatgtacagatgggtttttggtgtggatgtcctttctgtttgttagttttccttctaacaggaccctcagctgcaggtctgttggagtttgctagaggtccactccagaccctgtttgcctgggtatcagcagtggtgtttgcagaacagcggtttttcatgaaccgcgaatgctgttgtctgatcattcctcaggaagttttgtctcagagtacctggccgtgtgaagtgtcagtctgcccctactggggggtgcctcccagttaggcgggtcaggagtcagggatccacttgaggaggcagtctgcccattctcagatctccagctgcgtgctgggagaaccactgctctcttcaaagctgtcagacagggacatttaagtctgcagaggttaccgctgtctttttgtttgtctgtgccctgcccccagaggtggagcctactgaggcaggcaggcctccttgagctgtggtgggctccacccagttcgagcttccaggctgctttgtttacctaagcaagcctgggcaatggcgggcgcccctcccccagcctcgctgccgccttgcagtcagcgagactctgtgggcgtaggaccctccgagccaggtgcgggatataatctggtgcgccgttttttaagcccgttggaaaaggcgcagtatttgggtgggagtgacccgattttccaggtgccgtctgtcacccctttctttgactaggaaagggaactccctgaccccttgtgcttcccgagtgaggcaatgcctcgccctgcttcggctagcgcacggtgggctgcacccactgacctgcaccgtctggcactccctagtgagatgaacccggtacctcagatggaaatgctgaaatcacccatcttctgcgttgctcacgctgggagctgtagaccagagctgttcctattcggccatcttggctcctccctgaccaaaagcttttaagcacgtgtaccagcatgactctaccctttgcaactgtgccatgaatattagataggaaaagtgtccgtggcggaaacagaagctgctccagcactcttcaggaagaaaaatatagcagcagcagcagcagccgccaataacataaggggaattaaaacctgtccatcagactgaatcaggttcaacatttgagcacatctaatattctaagatgtagattctgaaagcaggtaagctctttctcttcctgcagatactacttccacttaatgtaagaaaattcctagctttgccaggcacagtggctaacacctgtgatcccagcactttgggaggctgaggctggcaggtcatttgaggtcgggagtttgagaccagcctggccaacatggtgaaaccctgtctctactaaaaatataaaaattagctgggcgtggtggcacacacctgtaatcccagctacttgggaggctcgaacctggtaggcagaggttgcagtgagctgagatcaggccattgcactccaacctgggtgattccatctcaaagaaaaaaaaaagctagctttgatctcatttataattgtttttcagaggtactgatattaacaaataccactccctccaaaataactagagtgataatgactgaaaaagaaaatgaccaaaatagacatgttggtaatgctactacagtaataaacatgtttgtaagagaaatgacttctaatgatttcaaatccagttgagacacttcagcatttaaacattttggtaacatatcactgataatgttgcaggtgacttaaatgttctctcttttgttgtgctttctttccactaggttatgaaaacctgcactcataagttacggttttcagagacggagacttgctgtgttgctgaggctggcctcaaactcctgagtttaactgatcttcccacctcagcctccctcgtagctgagactgtaggtgcaagccactgctcatatatttaaatcataaacttaaccatcaaccagctgtttggtgtaaccttttaaatgtcgtagtcctgtgagacctagcacaggattaaattcataaatttaacaaggtgaataggattagtaaaaaaatgaagggaaatgtggtttgcaaaccccagtctctgcgttagccagcatactactgatacatgtttaaactggagattctactatatttgaaatttgcaactattgtcagtgaagaaatagaacaatatctaacattataaataagtagaaccgttgagaacatcaacatatttttaaaagaatgatcataagatgaaatctggctggggattttctgtcagggtaaactggtaatttaaaaaaaatttggtcggggattttgaaaaaaatcccatttacaggtaaattttgctttaggcctcatttacatacaaatgctaggaggacatgaggcagttcacaagttctgtgctttctcacaggataaccactgtcctaatggcaactgctgtgagtgtgtttaaagatggtcagactctttcagacacctacctgagagtgaaaagtggttccatgtacaaggagagaggttcctgatggcaataagaggctggagtacattttagggagtggagagtggttattctaaactttctaatttaaatcagtgaacttgcgttactttgaattcaaaacttttttccacaaaaatggaaattaggggcattaatttctcaactgtcacatcaagttttgggtagggaaagcaattggaaaaaacaactggttgtttgcttttttttgagatggagtattgctctgttgccaggctggagtgcagtggcatgatcttggctcactgcaacctctctcccaggttcaagcaattctcctgcctcagcatcccaagtagctgggattacaagcgcacgccaccacacccagctaatttttgtacttttagtatagacagggtttcaccatgttggccaggatgacaactgttttttaaaaataatcgagggagtcacttaagatggaaaacattactgatgaccagaatagctcaaaaagaaacagcatttacctctccagaggaagggtacaccaagcttgcagctgccactgccaaccaggccttgatcctggctgtgagatccctcgcagtccccttatttttctgaacctgtttcctcatttgacaattctaccattcacagtgattgttgaaattaaatgggtatatgtgaaaatgttttcagctgggcgcagtcgctcatgcctgcaatcccagcacttcgggaggccaatgtgggcagatcacttgaggtcaggagttcaagaccagcctggccaacatggtgaaaccccatctctaccaaagatataaaaattagccaggcatggatggtggcaggtacctgtaatcccagctatgcgggaggctgaggcaggagaattgcttgaatctgggaggcagaggctgcagtgagccgagatggtgccactgcactccagcctgggtgacagagcgagactccatcatctcaagaaaatgttttcaaaattatattgcactaccccaacatattaggtggtgtcaaatgtgtgtatttgtatcttgagaatacctgtgctgataaactgtataggatgtattaattaggatggtatagaaccacagcagcttcagtctataaggtggttttgtttaaaagtagggaaggctgggcatggtggctcacacctgtaatcccagcactttgggaggccgaggcgggcggatcacgaggtcaggagattgagaccatcctggctaacacggtgaaaaaccctgtctctactaaaaatacaaaaacaaaaaaacaaaaacaaaaaaaacactagccgggcatggtggtgggttcctatagtcccagctactcaggaggctgaggcagaagaattgcttgaacctgggaggcggaggctgcagtgagccgagatggtgccactgcactccagcctgggtgacagagcgagactccatctcaaaaaaaaaaaaaaaagggaaaaggaaaaatcagaacaaagaaattagcaaagcaacagggctcatttcctgtttgtttggggtaggaagctgtattcattttattcttctgatttccaaagaaaaacatttttgtgggcccgggacactgtgcctactgggttaagtaggccttggtcagtagatgaataatgagctaagtgatcaagttcccatgtttcaatctcacatctataactgaaaaatgtatatccattcaatggggaccctttttctcacacacaaagcacatgtttacagcagacaggctgagaaacatatcatctgcagccaaacaactaaaaaaaaataccatgacacagtcaagaatcataaagtttactgtttcttttccatcatttggcacatatccaaggcacattagaaaattagaaatcataaattactttgtagaaaaataatccctcccttccttctgtacatacacaagtatttccaagaacatggacaaaaccatttccctatcacaaggtcatttgaaaacggactcaggacaaacccatatacgtgtagctctaggccaataacataaaaataacagtataatctatagaaatttataaaaaggaataaatggcaataaattctaaccgaaagtaactctgacctggtttgtgctgttaagttttgaatttgaatcaaaagactaagaaaagatgtgccaaatctactctctaatccagtaaccatcccgtcaggtgtgagtgtgacagacattcaagggaggttctcaacaaaaagggatgtttctagaaatactgctacaggtgcacgtgtagtaaccgaatatctgtacctacttgttagaaggaaaatgataaccaccctttcccatgtgcatgatgtggaacaggtctgatgcatcctttcactaaaatgaatatcaaaatgggattgaggcatcttttggttcgagtgttgctttgcaaagaaacattgtccagctgctgctttcttccttcagatatgacatttcagcctggcctctacagtaccatgaaacctaaattacttacttctctccagcttaatcctaggtggaggaattctagctgtggtttgtgaatgtacacaggtcagagaggtttagcaccttttgggaggaggaggtcagaatgcggtggtgaaacctctcccactgtgaccaacaaaccctcatacttaaaaagaagcatgcacctctggcttaaggatctggatgctactggaatttttgtctgtttcaattgtattcattagctttgaagaggagagagatggtggtggttaacttttttgttgcattctttcctgccacagaaaagctttcaggaacttggtgctgaagacttctcaagccagtctcatggaagcacatttagttctcagatgtgttcacgctcagcatcatcttgttgcatccttgcttcctagcagtgggttcaacaactcctcattcctgttaggaccgggaagcactaacctcttggggagtggagagggggccagcagcctccgggccctgggacacgaccgcatcctctaccgtgtgtctccgcagcatccgtctgtgtccagggccagtctgtgtcagtccaggcctctctggccagtcgctgttgcctttctcagcagcatgagatccactctgagctggcaggttattctgtctcagtgtgacactttgcctccctggctaaagaaaaagtacatttttaaccgttgacgtcctcactgtactggaagccacaaccatgacagtgacagctgccccttagtgcctagtgtcacataatgtgctcagtgcttgacaggcataatttcaattctcacatccctgtcgtggtaacatggcatgtgcatactacatgtgtcagagtaaatgtttcacttgttttcacaatctttatgactctaggaggcatgtactactattgttatccccgttttacacctgaggaaacaggatcagcaaagttaagccacctgcctaaagtcctacagctagcaagggaaaagctagcacttgatggaactcaggcagatttcaacgattctggctttcccacaaagcagcaggtctcctagcaacaccacataagactaaatatggtatcaaaattagtcatgttaattaaaatcattttaattatctaaaacaatttagaacttttgtgtatttgttccaacaagcctatgctacatatgctataaattctcatcagcaacaaggaaagctgtggttctgagaagaatcactgtctccgatcacaggttttcaatcaagcttctgagtgatttaaaaatgcagtagggtccgggcacggtggctcacacttgtaatcccagcacactgggaggccaaagcgggcagatcacttgaggtcaggagttcaagaccagcctggccaacgtggtgaaactgcgtctctactaaaaatacaaaaaaattagccaggaatagtggcacatgcctgtaatcccagctactcaggaggctgaggcgggagaatgcttgaacccgggaggtggagactgcagtgagccgagatcgtgccactgcactccagcctgggccacagagcaagactctgtctcaaataaataaataaaaaaatgtagtgggaagatggccacataaagaattgtctgagcaactgtacaccatacttggagacatcatttacccatctatatacaaactgtcgttttctttctttggtgattaaaaccatagtgaaatgtgggatgtttcatctcctataagcaccaagacctgtggtttcccacacatgtaacactttccactcctctgctcagaaatgtacttttagttataacaatcagtgaagtctgtactctacactgtcccatgaaataattccagttttaactgctgctaactcatacggcgcacggaataatgaagatgacgatcaaggagacgtgtttaccatggattacttttgacaaagccgggctttagaaaatatgattaaaagccagtgtttaataacttacctcatgcaaagaaccttcggttaaattagggacacttctatctcttgccataatctcccttgaagtctttcccctaaaacccaaaataaacgaaaataaatatttgggacagtggcatgaaacactctggttggccacaaggtggcagcatttttgacattagtaggtgcagatttgtccataaccaattacaattgaagcagcttacgtgcagcttggagtaaactaggggcaaaagcacagaaatcaacttgagtttcatactcacttaaactgaccagctgagtggacaaagtaaaactgtcttgtaaaaggctcatctggtagatcatacagttttgagttccctgtagataaaaagataaacatctaaaaacttcaaaaacagttgtaaagattattttaaaattacagcacagacacaatctttctattctcagatttacaaaatttagaaactgaagcactgaatttgcttaaagaaacacagctagtacctatttataacaggttgagtatctccaatccaaaaatctaaagcctaaaatgccacaggctgggtgcagtggctcatgcctgtaatcccagcagtttgggaggccgaggtgggcatatcacttgaggtcaggagttcaagaccagcctgggcaacatggagaaaccccatctctacccaaaatacaaaaacttagccaggcgtggtggcacgcacctataatcccagctactcaagaggctgaggcaggagactcgcttgaacccaggaggcagaggttgcagtgagccgagattgcaccaccacactccagcctgggcgacagagcaagactccatctcaaaaaaaagctacaaaatccgagacattttgaactctttgacttcatgctcagaagaatctgatttcctgatttggatcctcaaccaatgagtataatgcaaatattccaaaacccaaaacactgctggtcccaagcatttgagatagggggtagtcagcctgtattatgagaacccccatgaaatagaaaaataaaaccttaactcccttaactcccccagccacaaccaattacggtgagacagtctcagggttatcgagatatgtgaatgggtttatccatattattgtattgcattattgcatacctcactggataatatttcatattgtaaattaaaaaaaaaagtagaacaaggaccccttctaaactttttaaaaagaagaaaatacttcagtctcactgctgttcggcaactgctgttttaattataatcaacctccgtacacgtacaaacttaaaaaaaaatcttgaggccaggcgcggtggctcacacctgtaactccagcactttgggaggccaaggagggcggatcacttgaggtcaggagtttgagaccagcctggccaacattgtgaaaccctgtctctactaaaaatacaaaaattagccaggcatggtggcacgtgcctgtaatcctagctactcgggaggctgaggaaggggaataacttgaacccaggaggcagaggttgcgtgagctgagattgcaccactgcgctccagcctgggtgacagagtgagactctgtctcaaaaaaactaactaaataaaaaatcttggtggctcacacctgtaatctcagcactttgggaggccaaggcgggcagatcacgaggtcaggagatggagaccatcctggctaacacggtgaagcccctctctactaaaaatacaaaaacaaaattagctgggcgtggtggctggcacctgtagtcccagctacttgagagtgggaggcagctacttgaggcaggagaatggcgtgaacccaggaggcagagctggcagtgagctgagatcacactactgcactccagcctgggtgacagagcgagactctgtctcaaaaaaaaaaaaaaaaaaaaaatcttgaaaggtagcatttaccctggatgtccaggaaatgcccagaacacctgactttggaacatgaggcatgaaagaaactatcccagagactgttccccatctccataggcagacacctgaaccttcaaggtagtgttgacagtttctatcctatttcctcaggaaacatcattaccatcaaccagaaaactagtaacaaaaaaagcttacccatagtctgataaattgggaggtaacatacatttctttggtgcctgtatctcctccaggcatgattataattacactttacatatacaattaaatgaacaccagcaactactcatgaatgtctaaatatacccaacttgagcgtgacagaaagaacgtaaactcttacattttttcctgatcttaacagtgacatactccttgcggtcagtttcagccacatcatctaatgaagcaacacagcttggtaccacctgaagcaattccattatttttgaattctgcaatttgaaagggaaaaggaacagtaatgtttttattcttttttaataggttattatttgtttttgatctaaatgtcagtattagtgtgactgggcagaaaaagctcagaaataattacaaatggagcttggaggccataaagcccagtggtaaaagcaggcctgcatggggagcccggctctgcttttaccactgggtaaaagctctgccctctctgtggactccacgctggggattcaaccactccatgcaaccagctcaaccataataagatctactatcatatgcttatcatgaggctgttgagggcccccatatagtaagtactcattgaaacacattaattaactgggcacggtggctcacgcgtgcaatcccaccactttgggagactgaggtgggaggattgcttgagcccaggtgttcaagactagcctgggcaacatagcaaggccctgtctctatttaaaaataataaaaggccaggcgcgatggctcacgcctgtaatctcagcacttttgagaggccgaggcgggtggattgcttgagcccaggcagtcgagaccagcctggccaacatggcaaaaccctgtctctattaaaaaaaaattagctggtcatggtggcacacgcctatagtcccagctacttgggaggctgaggttggaggatcatctgcgcccaaaggttaaggctgcagtgagccaagattgcaccattatactccagcctgggcaacaaattgagactctgtctcaaaaaataataataataataaaattaaaaattttaaaaaccaaaaaaaattcaacataatcatttaagaaagtactaaactgagagtttaaaatatttcaattctgtcactgaaaattaatataaggaggccaggcacagtggctcacgtctgtaatcccagcacttcgggatgccaagggaggcggatcagttaggtcaggtgttcaagaccagcctgagcaatatggtgaaacccgtctctacaaaaaatacaaaaatttagccaggtgtggtgccacgtgcctgtaatcccagctactcaggaggctgaggcacgagaatcgcttgaacccaggaggcagaggttgcagtgagccaagatcacgccacaacagagcaagactctgtcttaagaaacaaaaaattactctaaggagcctgtccatggagtggattgatggtgatgttagcttctcagttgtgtcacttaacagcctactcgctgtctatcttgggtagaaaacaaaagaaagactcagcaggaaaacaggaacagaaagagctgccgctcgccaggggaaaaggacccttccccgccgctctccacgcaagcatccacagcactggagaaggcagtaggccaataatcacgattcctacaggactcaaggacttttactttcatttttttgagataaagtctctgtcacccaggctggagtgcagtggcacaatctcagctcactacagccttgacctcctgggctcaagcgatcctcccacctcagcctcctgagtagctgggactacaggcatgcacccctatgctcggctgattttttgattttttgtagagagggggtctcactatgttgcccaggctggtcatgagctcctgcgctcaagtgatcctccttccttggcctcccaaagtgctgggattacaggcatgagccactgtgcctggcctcaaggagttttaaatccaccaacaaaacaaaccttctccatcgtgctgctaagacaacggctgtgttcacactgtgaggatggtgacaccagaacatcatgacttgctccttcctgagtgcctgactctatgtaactaccggaccacagccctactgctagctgaggggggggcccctccactcaggcctttgaaaaccacctgtgaaaagaatgattcctggttcccagagcaccacctctgaccaggagactgaggaccagccatctacccacgctgtggacttctggcacaccaactacgcccagcccggcgatgccaagggccaggtgttgctattttagatccagcttaaacaaagggatccagagggagctgtgaggagctcaggattccctcggctcttcgaccctctccacctacctgttcagcacagtctacagccgtgcgctgccgcttgttcagcacctgaactgacgctccgtggagcagaagcagctctaccacgaagacgtgcttttcaatcacagcctcgtgcagcgctgtgttgcccttattgttagaagcgttaatggaggccccgtgctggaaagagaaaccacacgatcaaaaggaacgctacgaaacgtcagcatggaatctggctgtgggtatacaggtattcgctataaaacacattgttttttttatgtctgaaagtttccttaaaatttggggaggaaaagtaatactgagaaaaaaagatttatagacaaagagttcgctgcagcatttatcctaatagcagagaaaacagaagccacttaaatgtacagagcagaaacaggttcaaaaaaatcactatggtatatccatagttatgcaaccattaaaaatcaaagtttgagtaaataagtttctacattaaataacattaagacagaaaacaatacttggggccaggcacagtggcccatgcctataatcccagcactttgggaggcagaggcaggtggatcacctgaggtcaggagttcaagaccagcctggccaacatagtgaaatcccatctctactaaaaaaaaacaccaaaaaacaaaaaaattagctgggcatggtggtgggcgcctgtagttccagctattcgggaggctgaggcaggagaatcgcttgaaccccggaggcagaggttgcagtgagctgagagtaagccactgcattcctaggtgacagagcgagactccatctcggaaaaagagaaaacaatacttggcgaggccccgtggcttacacccgtaatccagcactttaggaggccagtgcaagaggatcgttggagctcaggagtttgagaccagcctgggcaacatagtgagacccccatctctactaaaaacaaacagcaaaaactagccaggtgcagtggtatgtatctgtagtcccagttagctgggaggctgaggcacctgagcctgggagactgaggctgcagtgagctgtgagggtgccattgcattccagcctgggccacagagcaagaccttgtctcaaaaaaaaattaataaataacactgaaactatacacatttgtcaaaagtccaccataatgagtttcccttgagtagcacagtcatggacaggttggtttttccctacttctttaagaaattctaatgcattcacataacctttttcaagagcagcagggacagaggcggccactcagcccatgctcaggtaacagcgtgacacattcccggtcggtgaggtgagacccaaacccttggcaaaagcagcgtcggagcccttgagaccgcatcccagatgctggggcaccatctgttcccatcggagaaccccgtgtgggaagacgcacgccctgctcctctccccagaggcctggggttgatgggtggccgggcctctccatccccagtgcgctgcgggggtcgctgggtggaggcgccctgttaactggcgcaggtgtgtagaatgaggacaggaaggggccctcacctgtagcagcagtgccacaagctcgtgatggccaccggagcaggcgtaaatgaggggcgtgtttccactgaggtccttcttattgggttttgcattcgaatctaacagacacttcaccacctgggccagagaaggaaaacgtgcaaacttaatcaaaatttctgtcatttcctgccagagaaaaattatgaaaaataaataaataaataaataaaataagaaaacaaagtttctggagagaaatgctcaagtttgatattcttttgacttgtctctgagcttatttttttgttgttgttctttttggtttttctttcttttttttttttttttttccagacagagtctcgctctgtcgcccaggctggagtgcagtggcgtgatcttggcttactccagcctccgcctcccaggttcaactgattctcacgcctcagcctcctgagcagctgggactacaggcgcctgccaccacgcttggctaattttctgtattttcagtagagacggggtttcaccatgttggcagggctggcctcgaactcttgacctcaggtgatccacccgtctcggcctcccaaaatgctgggattacaggcatgagccaccacgcccagccgtctctgagcttattgagaagactttagactctcaggagaaaagggaccaggtgaagaggggagggctaccatctgctgcggggctgctctgtgcggttgaagcgcagggtgacagtgatctcacttcacccgatgtgctgggcgacagtgatctcacttcacctttctatcctttctacctcagggagagctgcaatcgccactccgaatttacagattaggaaagccatgcctgaagctctatgctaggtgttggcgagagagatgcaagacctgaaatatggctcctttctttaaaaagttaacagtagaactgataaaggaaaatgaaaaaatatacacacagttttccttaaagaaaagcagggcctggtgctgtggctcatccctgtaatcccagtactttgggaagccaaggtgggaggatcgcttgagctcaggagttcaacaccagtctggacaacatggtgaaaccccatctccacaaaaaaaaaaaaaaaaaaaaaaaaaaaaaaaaaaagaaaaatttatctaggtgtggtggtgcacgcctgtggtcccagctactagggagggaggctgagatgggaggattgtttgagcccaggagattgaggctgcagtgtgagctgagattgcaccactgcactcccacgctccagcctgggagacagagcaaggtgatgtcttaaaaaaaaaaaaaaaaaaaaaaggcaaaaaaccccagcactttcaaaaagttaatcactccaaaattcaaaattcttccttgagcccctctatggggccctgactgttctttatgaagtgctgaactgtttggcccagagcaaggcactgtcggggtgtaaaggtggtaagatgaccatggggacagtgctcggtggccaccacacgagctcaagagccagatcctgctgggggcaagaatcagaatgacaacctcggtatcacccagatgggagtggcagtggggcagggactggctccacccccagggagcatcaaggctctgtgctccgaggctgagtggcctaccgtgtgcacctcagaatctcagggctcgggggagcagtgtcctccagggtagccaccaaacccctgcagcgttcctaccaagcacaaggtcctagcccaaagcagacaccctgctccaccacccccaacacacagcccgaacctgaaagtggccctgctggcaggccaggtggagcgggacggcttggtctgcgttcctggcacctgcgttggccccgtgcttcagcaggagggggatgaggtccgcccggccgtgcagggcggcgacatgcagcggggaggagccgtcctggctggtcacgttcacaccaagcccactggcaggaaccttcgccagcctctgggaagcgcagaagatggaaacacaaacgtcatcagtattgaagaaactgggctggagtgattggcaccatgtgccccccacagctcccacacacaatgcgggatcatggcgggatccaggatggattccaatttgtttagaagtatgtggcatgccaaaaaacaacttcctttttttttttttgagacagggtctcactctgttgcccaggctggagtgcagtggcaccaccatcatggctcactacagcctcgacctcctaggctcaagtgatcctcccgcctcagcctcccaagtagctaggtccacaggtgcaagccattgtgcccagctaatttttttttttttttttttttgtagagatggggtctcaccagctggcccaggctggtcttgaactcccaggttcatgtggtcctcccacctcagcctcccaaagtgctgagactgcagatgtatgccactgtacctggctaatttcacttttttttttttcaccagggctgtagagcctccaaatttcctttgaggggcatggccacagccccgcaaaggcgacgagattcacttgctgtttgcacctctgtttaaaccaccgctataagaaacagtgattcttgggtttaggtgagaataattttactttttgatgattaaaaatgttacctctttaaaaaaaaaaactgtatgctaaattaaaggctgaattttattatatgtaaattatatctcaaaaataaaaaagaagctggaaaacacacatgtgcacatacatacacacactaaatgaaataccctgcatatttatcagaatggctaaagttaaaaactcaaggctgggcacagtggctcatgcctgtaatcccaacactttgagagtccgaggtgggcagatcacctgaggtcaggagttctagaccatcctggccaacatggtgaaaccccgtctctaccaaaaatacaaaaattacccaggtgtggcggcacctgcctgtaatcccagctacattacaggcatgcattgggctgtagaatcgctcaaacccaggaggcgaaggttgcagtgagccaagatcacaccactgcactccatccagcctggctcactgcaatctctgcctctccggttcaagcgaattctcctgcctcagcctcccaagtagctgggattacaggcgtgtgccaccacacctggctgatttttgtatttgtagtagagacagggttttgccacgttggctaggctgggcaacagagcgagactccatctccaaaaaaaaaaaaaaaagtcaaaataccaaatgttggcagggatgtggagcaactggaatgctcaaaccctgctggagggaacagaaactactccaaccactttggaaaactggcagtttcttttaaggttaaacatatccttactatataatccagcaattatactcctaggtgtttacccaacaacgtatatatccacacaaaggcctgtaactcctaggtgtttacccaccaacgtatatatccacacaaaggcctgtacacaaatgttcacaatggctttatttacaaatccagaagcaggaaaactactcagatgtccattaacaggtgaatgaaacaacaaattctggtgtgtccacccaatcaactactatccagcaatgaactcctgatccaacatgggtctcaaaaatatcctgagtcaaagaaggcagacatgaaaagggacatgcgttagaattccacttacaaaagattctcgaaagtgttaactaatccatgatgatgaaaagcaggtcacgggttgcctgggagaggcgatgggggaatgggggggtcatagtgggggggaaggcaaaatctcacaggaaactcttgcaagtgagggaaacgttgtgtatcttgatggtggtgatggtttcacaggtttatatatctgtaaaacttgccaaattgtatactttaaatacatatgctttatgtaaatataaattatataaattataatgtatataattatatttcaataaaagatttaaaaacaaattctaaaacaccactggagaccgggtgtggtggctcacgcctataatctcagcactttgggaggctgaggcaggaggatcgcttgggcccaggagttcgaaaccagcctggacaacacagccaagaccctgtctctacaaaaataaaaaaaataggccagcaaggtagcttacgcctgtaatgccagcactttcgggaggccgaggcaggtggatcatgaggtcaagagatcgagaccatcctggccaacatggtgaaactccgtctctactaaaaatacaaaaattagctgggcatggtggcgcatgcctgtagtcccagctactcaggaagctgaggtaggagaattgcttgaacccaggaggcagaggttgcagtgagccgagatggcgccactgcactccagcctggcgacagagcaagaccctgtctcaaaaaataaataaataaataaaataaaatagcccagcatggtggtacgtgcctgtagttccaaccatttgggaggctgaggcaaaaggatcccttgggcccaagagtttgaggcttcagtgagctatgattgcaacactgcactctggccttggtgacagaccaagaccgtctctaaaaaaaaaaaaaaaaaaaaagtttaggccaagcgcagtggctcatgcctataatcccagcactttgggaggctgaggcaagcggatcacttgaggtcaggagtttgagaccagcatggccaatatggcaaaaccctgtctctactaaaaatacaaaaattagccaggtgtggcggcatgcacctgtagtcccagctactcgggaggctgaggcagaagaatgtcttgaacccgagaggcagaggttgcagtgagccaatattgcaccactgtactccagcctgggcgacagagggagactccgtctcaaaaaagaaaaaaaagaagtaatacattaaacaccactggaggcctggtgtggtggctcatgcctgtaattccaggactttgggaggctggggcaggaggatcacttgagcccaggagtcccaagctgtaagtgagctatgattgtgccactgcactccagcctgggtgacagagtgaaaccccatctctaaaaattaaaataaaataaaataaaataaaataaatcactgggctagaagaggatggggggagtggattttcatttaatcacagacatgaagcagtttagtggtgtgtctttttgagaaatcacaaaaagagaataagaggttttagaagtacagggaacctaagacttcacccaattgagttccacagtattttactgtgtaattaaagtgggaaaacacagggaggagaaaaatggcaaaaacagcagcagcggagatgcagcaatctcgccacacacaggtactgagggcccgagggcttcatcacttcccaccagatgctagggaacaccatctgcctttcttatcctgtgttttcatagccacccacctcggggaaattgtgttctggaccatgtgcatccagcagcagggggccaggtcaaaaggtgcacatccccagtgtacatgttacctcacagctgaaaaatgtgtgagggaaaactttagtcattttcaatatccttagagtcacccacgctgaagttctttttagaaatggtaaaattatcctacaatataaaggctaacaccactctatctattttataaagtcaaatccattttcttttttttgagatggagtttcactcttgttccccaggctagagtgcaatggcacgatctcggctcaccgcaacctccgcctcctgggttcaagcgattctcctgcctcagcctcccgagtagctgggattacaggcatgcaccaccacggccagctaattttgtatttttagtagggatggggtttctccatgttggtcaggctggtctcgaattcctgacctcaggtgatctacccgcctcggcctcccaaagtgctgggattacaggcgtgagccatcgtgcccggccaaattcattttctattttctattttatatttttagtttcttagagacagggtcttactctgttggccaggctggtctcaaactcctggcctcaagtgatcctctaacctcggcctcccaaagtgttgggattacaggtgtatgacactgagcccagcctaattctcttagtatgggacatacacatctataattagatagctaacacatgaatgcatgctatgtatgcaataccatttacaactgcttgaaagaagatgaaatactgaggtgtacacttaacatgacacaggcaggatctgtatgctgaaaaaaaatcacaaaatgttgatgaaagaagtcaaagaaggcctaaatacttggagagatgtaccatgttcatgaagactcaacatacgttgagtcatatgatgttatttctccccagttcatctataggtttaatgtaattcctatcaaaatccgagcaaggtattttgtagacatacaaaaactaattctaaaattgatatagctcagaccagtctgggtactataagagtgagtaagttagtaagtaagcaataggtaaataaataaataaaatttacatggcaaggcacaggccatagaatagctgaaatattcctggcaaagaagaataaattaggaagaatcattcaatccaatactgaggcttactacacagcatcagtcatcaagacagcgcggtactggtaggatgggcccatagatcaatgcagcagaacagagaacccagaaatagatccacacaatctatagccaactgaggtgcaaaggcaagtcacgggaggaaggagaggcttttcaacaaatggtgctggcgcaagtggacacttgtaggcaagaaaaaacaaagaagaacctcaacctaaatctcacactttgagtaaaaattaacacaaattggatcatggacttaactataaaatataaaattataacttaaaaaaaacaggagaaagttggaaatctagagcaaggcaaagaattctcagacttgacaccaaaagtataatccataaaaggaaatactgacaaatgagatgtctaaaaacctttttctctgtgaaagcccatgtgaggaaattatagacaagctacagactgaaagaaaatgtctgcaaagcacgtatctaacaaatatccacatatctagaatatataaattcaacgataaagccaaaaacaaaccaattagaaaatgggcaaaacaaatgaacagacatttcactgaagaacatatacagatggcaaataagcccatgaaaagctgttcaacagcatcagccattagagaaatgcaaattaaggccacactgagatagtactacacacctatctgaatggctaaaacagaaaataatgaccacacccagtgctggggaggacgaggaggaactggatcactcatacatcgctggtgggcatgtaaaatgatacagcctgcttgggaaaagactgtcagttccttataaaaatgaaccatggaattgccatgcaatgaccatatgactccacaattgcactcttgggcacttatcctagaaaaatgaaaacttgtgttcttaccgaaacgtctactctaatgtttgttcgtggcagttttattggtaatattccccaaactagcaacaaactacatgtccttggacattccacagtgagtatatgccaccattaaacaaatggaatgccaccccgccatggagaaacagacctgattctaggcaacagtgtggaatcaaacggagtgaagaaagtcaatcccaaaaggattgtatactgtgattacatttatgtaacttttttttttttttttttttgagacggagtcttgctctgttgcccaggctggagtgcggtggcacaatctcggctcactgcaagccctgcctcccgggttcacgccattctcctgcctcagcctcccgagtagctgggactagaagcgcccgccaccacgcccagctaattttttgtatatttagtagagacggggtttcaccatgttagccaggatggtcttgatcttctaacttcgtgatccacctgcctcggcctcccaaagtgctgggattacaggcataagccacttatgtaacgtttttgaagtgacaggattagggaaatggagaacaggtaagtggttgccagcggttggggatggtggggtgggcgtggcagggagagaggtgggtgtggctgtaagagggcagtttgaatgattggtcttgtgagagaactgtgctttccggtgacagacacatgctgcgtcttgatggtggtgatggcttcacaggttttacatctgtaaaagctcaccaagttgtataaatacatagactttattgtctgtgaattatacttcgataaaggatttaaagaccaattctaaaacactgggctagaaaagaatggcggggtgggtttcaatttaatcaaagatataaagcagtttagtgttctgtctttttgagacattacaaaacaagaacaagaggctgtaaaagaacaaggaggccaggcgcagcggctcacacctgtaatcccagcactttgggaggctgagatgggcgaatcacttgaggtcaggagtttgagaccagcctggccaacatggtgaaaccctgtctccactaaaaatacaaaaaattagctgggcgtggtggtgggtgctatggtccccgctacacaggaggctgaggcaggggaatcgcttcaacccgggaggcagaggttgcagtgagccaagatcgcccgacagagcaaggctctatctcaaaaaataaaaaaataaataaataaaaagaacaaggagtatataaaagtatctgtcacagaaaatatcttgaatgtgatggtggatacataaacctacacatgtggcacaactgtacagaactacatacacacacacgagaacaagcagaactggggaaatctgaactaagatccacggattgcatcaatgttgatatcctggctgtgattctgtaccacagttttgcaaggatgttacccctggggaaagctgggagagggtttggggatttctctgcacttggagggagagtccccatgaagagtgaactcaactgagtaaaagcaacagcagaacatgcgtgcagcttccctggggggctttaggtacctggaaggagacccttgagcatctgttcataagctcctgccacgggactcaggggcccagatagcagccaaaacgctaatcatgggacacatctctgctcgcttacctgccacgcagggagctggcacccgccctaggctaatgagtctcaccatatcttggggaatacctattcacagacatgcagtacagtaattatctggctgagaaatcgagaactttcctgagggaaaaaggaagaatttgctggccaggagcagtggctcacgtctgtaatcccagcactgtgggaggctgaggcaggaggatagcttgagcctgggaggccgagaccagtctgggcaacacagaaaggctgagtctctacaaaaagaaacaaattagccaggtgtggtggtgcatgcctgtggtctcagctagtcaggacactgaggtgagaggatcatttgagcccaggcggttgaggctgcagtgggtcatgactgtaccactgcactccggcctgggtgacagaacgagaccctgtctcaaaaaacaaaaacaaaaacaaaaacaaaaattgcctacattccctgacctccaccaacagaaacaaagccaaaccttctgagctggggcacacttggggcactggcacaacgggtgacagaattcggggtccgctgcactgacagtgtcctccgcatcctccaggtcctcctctgtccattccaacaggtaacgcacctggtgatggagagtaacggaaacaggaacacatcctcagcgtctttgcatgcacaatatcttaaacacacaccatcaaccgttcccaatcagggcccacgcttccttctccaaccccacagccatttataaccggcttctgctccctcatgaagccttcctcagtccttccacttcacagcttatgccagagattattttcttctatcataaaaaaggacaggaagattggtgctgcctcagggtgatggctttaaaactctagtcctagggctgggcgcagtggcttataggtgtaatcccagcattctgggaggcagaggccagagaatcgcctgagcccaggagttcaaggctactgtgagccatgatcacaccatagcactccagcctgggcaacagagcaaaactctcaaaaaaataaacccatcctggtcctagggcacttagtgagcacctcactccctcctccattaaaagtggaagatacgggcaggcatggtggctcacgcctgtaatcccagcatttggggaggcctaagcaggcagatcacctgaggtcaggagttcaagcccagcctggccaacatggtgaaaccccgtctctgctaaaaatacaaaaattagctgggtgtggtggcgcatgcctgtagtcccaccttctcaggaggctgaagcaggagaattgcttgaacccaggaggtggaggttgcagtgagctgagatcatgccactgcactcctggatgacagcgcaagactccgtctcaaaaaaaaaaaaaaaaaaaagtggaagacacagtcctttcaaagggccaaaggcaagccaggggaacctgtccgtcagaatctaaggaaggctgtctccaatgtccactcatttcactgtcagatgtacctaatggttaggaaagacgccttccttcaagccacgacattctctccaggtgccagcccagggctggcggctccatctttatccagatacctgcttatgactcctcagagcctcaagcctcaggccccctctcgtggcccaggagtcccagctgaccacagcttctgcagaacctcacaaacaccactgggctctgccttcgcctctctacttcctcctctccccaagacgctgccctctcttaaaaccaagctgccctccttgcacactggctagtgggcctgggctctgagcccacactctgtgcctcggacatggtctctggtcttggcaacgtctcatcacactcctggagtatggacatctgaaaggcagggcccacactcgctatgtgcctgtatgttgatctgcctcattacttgtcaggaaaatataacaacaccattaccaaatatgcattaaacatagcgccctctgcacaaaatcagagtccacatggcccgaaactgaaccggagacaagaaacacaggtgggtggctgttttaagctagaacaagctttttataataaaaagcacttctaaagctgggcagggtggctcacacctgtaatccaagtactttgggaggccaaggcaggagaatcgcttgaggccaggagttcaagatcagactgggcaatatagcaagaccttatctctacaaaaaatttgtttatgattagccaggcatggccgcgcacaactgtggtcccatctattcaagaggctgaggcaagaggattgcttgagtccaggagttcaaggctgcagtgagccatgatcacgccactgcactccagcctgggtgacagaacaagaccctgtctctaaaaaataaaaataaaataaaaagcacttctaaaaactcaccatttctagatctccatcagcaactgctctcaaaagtttttctaccttaataaaaggaacaagaatgttagaaaaatgatttcaacaataaaataataatagaaataatataaacattctgaaaatctattggcttgatttgtggacttttaacgtctgatttagttttttttttttttttttgagatggagtttcgctcttattgctcaggatggagtgcagtggcgcaatctcggctcaccgcaacctccgcctcccaggttcaagcgattctcctgcctcagcctccctagtagctgggattacaggcatgcaccaccatgcccggctaattttttttgtatttttagtagatacagggtttctccatattggtcaggctggtctcaaactcccgacctcaggtgatccgcccacctcggcctcccaaagtgctggcattacaggcgtgagccaccacgcccggctgatttagtatcctgtaaatgtgtccctaaaactgctcagggagggcatcctaggaagttgctggtgtgcgcagaacccactgccatttagggaataataaactgtaactttatcagtggaattgtataaatgtatatgtatatttatatgtatatacatataaatgtatatttatcagtggaaaggtgaggccatggtcgccttggaacacaagtccttcctaagacgccagccacccctatgatttagaaaaatacacttagctaagtgcagtggctcggcctgtaatcccagcactttggaggcaatccccaggagtttgaggttgcagggagctatgactgtaccactgcactccagcctgggtgacacagtgagaccgtgtcccaaaaagaaaaaaaaaaaaaaaaaaaaagaaatactgaactcagctatcagtatctgctagctgggacaccatgagggtggacacccctcccagggacaacttcaggtctccgttagactctggaccatgtctcttggctgtctctgctatggctttgcatggagctaagctcacttggtcctccaagagcatgtcacggcttgtgggtagtgggacactatggtagggtcagtgagggttcagcacccatgggggggccatcgaaggtggtacatccattcaacagtccactcctcagctaaagaatgaggcagatctggccgggcatggtggctcacgcctgtaatcccagttacttgggaggctgaggcaggagaattgcttgaacctgggaggtggaggttgcagtgagcccggattgcaccactgcactccagcctgggcaacagagcgagactcttatctcaaaaaataaaaaataaaaataaaatgatctgaaatcagcggacttctacatgacctgacttgtcttcttcttagcctatcctctctttaatacacaaacgcactctaccacactaattgctgctcagggagtggtccatgaagggcacaccaaaatatacagcaccgcgagatgctgctgggcccagcttgaaggcaccaacctcggccaccacagagcagcagcggcctcagcatgggcaagcaggctgagagggcggcccttgtcaggccacggctcttcagctggacaccactgcccagggccgccaaggcctcccctccccagcccttcctctggaagcctcacctctctgtagtccttcttggtctcctcctgccttgagctggctgacatggaggagaagctggaagtggaggactcttggctgatggagtccacggagcgctgcggggactgcacaggggcctgcagccaaggagccccaacgagagagaggacaggacacaaggacacgtgaggaccagagaaggcgcccttggtctccaaggtaacctgacctgctcagcccggctgacttacctcggacgacttctgcctcctctcgaaggacaggtgataggcttccattacagacagaatctagggggacaagggggatgccaacagtaccccgtgagatgggggtcgtctcagcacagtgccatcacccacacgccccactgccggcctagctcctcggaatgtcagtgcagtgagccttaggtcacgtggcccagtcgcacccttggatagacagaaaaaccaagacccagagcaggtgggaacttacgcacgatcaccccgaagtcggggcttcctcccttcacggctcctcctgtcccgtgggagggctcagggcttcccacgcatggacgcaagggataagagaagccagacccgcatggagcctgaaaggtgactgcatccagcccccaggcctgtctgtccacaggcatgaggtgtggcctttcctctagcacccacaggtctcaagtaggaacagctcagagccaagccgagaaggcagcctctcttttcctctgcagatctccctctggaagggcctttggtaaacaaacgccacggcaatagaaccctcctcccaagacatcccagcagccccagccgtggtggcactgctcagcccagtcagctctgcctgccagaaagctgcgaccttggcagtattcagggggtacagccggaggcccctgaagccagaaacagggatctaacccttcacaaactgtgctttactgtagttcttatgctgtgtccctgccacacacacacaaaataatttaaaaaaaaaaaaaagagggaagccgggcgagatgacccataactgtaatcccagcactttgggaggcctaggtgggcagatcacttgaggtcaggagttcaagaccagcctggccaacatgatgaaaccccatctctaataaaaatacaaaaaaaaaataaactagctgggcttggtgacacacacctatacctcccagctacaagggaggctgaggcaggagaattgcttgaacctgggaggtggaagttgcagtgagccaagatcatgccactgcactccagcctgggcgacagagcgagactccgtctcaaaaaaaaaaaccaaaacaataaaaaagaaagatgaaagcaggggcggtggctcacacctgtaatcccagcactttaaggggccaaggcgggcagatcacttgaggtcatgagtttgagaccagcctggccaacatggtgaaactccacctgtataaaaaatacaaaaattagccgggtgtggtggcgcatgcctgtagtcccagctactcgagagctgaggtgggaggatgccttgagcccaggaggcagaggttgcagtaagctgagatcgcaccactgtactccagtttgggcaatacagccaaaccttgtctcaaaaaaaaaaaaaaaaaaaaaaaaaagagaacagaagtaaacttttggaggtgatggatatgtttatggcgtagatggtggtgatggtttcatggatgtccactcttctctaaactcatcaagttgtatacactgactatatacagctttctgtatgccaatcatgcctcaataaagaggtttagagaaaacaaaaataaaaacaaattcaaactgtgctactccaagaataagatgtgaacaaactgaaagaacaacctggaagagctggaaattataaaagggagcagtaaaacatcaaaaggcagaaagctggccaggcgcagtggctcatgcctgtaatgccagcaccctgggaggccaaggtgagaggatcacttgaggccaggaatttaagacaagcctgggcaacacactaagatctcatctctattacttttctaaaatcatatattttggggctgggcgcaataactcacacctgtaatcccagtactttgggaggccaaggtgggtggatcacctgaggtcaggagttcaagaccagcctagccaacatggtgaaaccccatccctactaaaaatacaaaaaattaaccaggtgtggtggtgggcacctgtaatcccagctgctagggaggctgaagtaggagaatcacttgaacctaggaagtggaggttgcagtgagccaagattgtgccactgcactccagcctgggcaacagagcgagactccatctcaaaacaacaaaaaaaattaaatatttttgtaaaaaggcagaaagtcaggcctgtacaaacggggctcccctagagacctggagtggaacagaatccctcaggggagcctcagcttgcagatattctggacgtccatgctggggtctccatttcacagggccctgtgctccccctggtcagtctgccacatgcctctctaacgatgccattcaccagctctgctgccgggagacgagagtgcagagaactggcctctgcgagccacctccaagccccactgactcacgagaggggagcacttcacaacatgctccccaaactatgtctccagaaattactaccagaaaaaggtgagctcattaacaaattatgtatgaaagaaaccacactcgatgtccagaactggccgagtctcaataaagactctaggcattgaaggtgaagcaccgggaaaaaagagttccaacacatcctgctccctccccagtccctgcccctgcggagcctcgtttctacccactccatttgccaataaatcaatagcactcggcagccagaacaaactctgcctgcaggagttcctggaacaaccctgagaaaaacgcccactcaaaccaaaaataatatatcagtaaaacccattaatgatgacgtcccacatgcggcagaaagggtgcaagccaagttctgccctcaggcaataatgcacaatttgtctagtaggccaagacctaagctacggacatcgatcttctttcgaagtcatcttgcccctcagagatgggaagagctacctttgagtttaatgcacacttgaggggcgtctccttcagtctgttctggatctcggtggacgctccgttctgcagcaatgtctctatgacgccttggtagccccagcgggcagcaatgtgtagaggggtgtctcctttctcattgccaatgtcaagtctgcacgactccacgtcgtagtaaaccagagccttcacacactgcaaagagatggggaaatggcatcgctcatggatgtaccaagcctcgacaaggtccgtgctctcctcgacctcctcaccaagcaaatgtgcagtaacagacagaactcagaagtgtcacagtatctgatcaggacacctcattctcattcattttttttttctttttcttttttgagacaggatctctctctgttattcaggttgcagtgcagtgatgcaataatagctcactgcagccttgaactcctgggcttaagcgatcctcccacctcagcctcccgagcagctgggactacaagcatgcaccaccatgcctggatggtttttttttttaattttttttttttcctgtagagacagggtctcactctgttgcccaggcaggactcaaactcctgggctcaaaaaatcctcccacctcagcctctcacagtgctggaattatagatgtgagccactgcgctcagccaggacacctcatgctttcaaaaggatgaaactgccaatcaataagaagtggctgcaaaaactgtgatgtctccatgtacagaacagagttactacagcaggcctgagactgctaaccactgagaggcctgcttgcaagactgcctgttggcctgaaacattctatgggtgcctggatgtggggagtgttcccaaaattccctaactgattaggtggctcacactgggcctgaattgttttatacaatgtggtttatgctgaacgcccgagtttcttctgggagtatggcattttggtacatgctgtccagaaggtgcttacaggactagccttcattaactcttggggactgagttcctaatgagcttcccgagtggaccacacttcctgtgtgttgttccaactcactgctggaagaactgagcccatcctgtgtgggtccatgaaaagagacctgttgttttttttttttttttgagacacagtctcgctctgtcgcctaggctggagtacagcagtgcaatctcagctcattgcaacctccgcctcctagttcaagtgattctcccacctcaacctcctgagtagctgggattataggtgtgtgccaccacacacagctaatttttgtatttttttagtagagacagggtttcaccatgttggccaggctggtcttgaactcctgacctcaggcaatttgccggccttggtctcccaaagtgctgggactacaggtgccagccactgtgcccagccgagagagactgtttgaagctcacccctgctctcctctctggactccaccacgtgcctgttccctttgctgatgttgttctgtgtccttctgctgtaacaaaccacagctgtgagtgcgactatatgctgagttctgtaagtcctcccagcaaatcactgagcccaggggtggtcttggagaccactgacacaacacacgatagatcactgcagctattaaagaatgtgctagatggccaggcacggtggctcacgcctgtaatcccagcactttgggaggctgaggcaggcggatcacttgaggtcaggagttcaagaccagcctggtcaacatggtgaaaccccgtctctactaaaaatacaaaaattagctggatgtggtggtatgtgtctgcagtcccagctactcaggaggctgaggcaggagaatcgcttgaacccgggaggcagaggttgcagtgagccaagatcgtgccattgcactccagcctgggcaacagagcaagactccgtctcaaaaaaaaaaaaaaaaagaatgtgctagatcaacagggactgacctagaggatctctgtaacgtagagctaagttaggaaagcaagtggcataaaagcatacagggcatggtgtcatcttcatacatcaaccacctggccaggcctgagccccacacacgtgtgtaaatctatccatatatcactatggagagaagccagaaggagggcgggtaggaaaaaataagcacatagtggtgaaacaggacgtgaaaatggaaattacgcaattcttggatatcattataaaagtgaaccagaaatggtggctcatgcctgtattcccagaactttggaaggctgaggtgggaggattacttgagttcaggaatgtaagaccagcctgggcaacatggcgaaaccctttctctacaaaaatataaaaattagccaggcatggtggtgtgtacctttagtcccaggggaagctgaggtgggaggatggcttgagccaggaggctaaggctgcagtgagccaaaatcatgccactgcactccagcctgggcaacagaacaagatcttgtctcaaaaaaaatttgtttttctaattttaaaaagtaaaaaataaaggccaggtgcggtggctcactcctgtaatcccagcactttgggaggctgaggtggaagatcacctggggccaggagatccagaccagcctggccaacatggtgaaaccccgactttactaaaaatacaaaaattagctgggtgtggtggcacacacctgtaatcccagctactcgggaggctgaggtgggagaatcgcttgaacctggaaggaggaggttgcagtgagtcaagatcccatcgttgcactccagcctaggtgccagagtgaggccctgtctcaaaaataaataataagtaaataataaaaacagaaaatgtaaaaattgaatatgtacacaagtaagaaccagacggtagcaaggagaaatgaaaatgatttgacttcaggataagataatgagtgacttgttttaaactttgttacttcaatatggcatctgtaatatattaaacattctctttttttttttttttgagatggagtctcactgtcacccaggatggagtacaatggtgccatcttggctcactgcaacctccacctcccaggttcaactgattctcatgcctcagactcctgagtcgctgggattacaggtgcccgccaccacgccctgctaatttttgtatttttagttgagatgggggtttcaccatgttggtcaggctggtctcgaactcctgacctcagatgatctgcccacctcagcctcccaaagtgctgggattacaggcgtgagccaccgtgcctggcctaacattctttcatattaaaaaaatttacacacccaatgttccaataattatcgacacaaaatacattaatgagaaatcccgacttctctacgagtgggaaagggtgaacgcagcccccccggaacagcaagagccactcacgtcctcgtggccgtaggtgcaggccaggtggagtggcgtattcccattgttgtcctgcacttccgcgctggccttgtagtgcagcagcagcagctgcggagataaaggaaagcgatgagcagggcacagccggctccctgggaggcccggcctccagtcttagcagggggaggtcatttgctcccatcttcgatcttatttatgctactattcaaattaaaccaacacccatcattcctgacacttgagagactgaagaaaaaagtctaaagccccaccttttcttcccccatatgatcaggaagtttttctttttagagaactcagcctgtctcccaggctgaagtgcagtggcacgatcattgctcactgcagcctcgacctgctgggctctggcaaacctcctgcatcagcctctcaagttgctgggactataggcacacaccatcatgcccagataattttaaaaaaatattttttggtagagatagggtctccctaggttgctcaggctggtcttgaactcctgggctcaagcgatcctcctgctttgggctcccaaagcactgggattacaggcgtgagctaccacatctggccaggaagtttcaaatctaaacctaacgatcttgtccaggagactcagaaagtcttcccaggagaccccgggagtccttggactccctgactactgctgcagcagagctggtgtggaacgaggggggcacagcaccaggagacaggggtgcagggtagccagcatgaccgtacagtcaccacgcagaaccaagctcacaggagcaaagcgacagcccgccacaaaggcaccactgctcaccgtcacgctctggtagcccttctgacaggccaggtggagcggagtggctccatggtagtctgtggcatttaccatggcgcccttggaaaccaggaggtcgatgagggatgcctgccctgcagagcagaaggacgtcacgatggagaaggaaggcgcagaggccttccacaccttaactgtaaaaccacaacactattgcaccctcctagtcctgggcatgaaacccacggtagatactttttctgctagagaggaactacagctaatataaagtaaggctccgcagactccagacatgttggggtgggccttggaggggacccagcaaaagtccacctctcagcaataaacaataatggaaaagagacttagacttccacaggctccatgactcatcagttcataagatggagtattatgcagccattaaaaaatactgacaagtaaacatattcttgcatagtgctaggagaaaaatagcacacaacagaatattatgagccctagagcaccacacactttatgcgtccacacatccacacaagcatgcagacaccccagacactcatcaatcacaacgatctctgggagacagggatggccggggactctggaggaccttatgttttctatcttgaatgtgcactttattttatttatttatttatttatttatttatttatttatttatttatttattttttgagacagagtctcactcagccacccaggctggagtgcggtggtgctatctcagctcactacaacctccaccttctaggttcaagcaattcttctgactcagcctcccaagaagctgggattataggcgtgaccaccacaacaggctcatttttgtatgttttgtagagacagagtttctccatgtcggccaggttggtctcaaatgtctgacctcaagtgatttgcctgcctcggcctcccaaagtgctgggattacaggcatgagccaccatgcccagccaaatgtatactttaaaagacaataataatatttttttaaaggcagggccacaagaactgcgagctgacgattctgagaccgttctcatagttcagattcaagccttcccttgctgggcccccagcctgcgggagcgttaggcagtgtttccatgccgtgggacccacgcaggggggctcagccagcgcaggaggcagcagggtggccgtcgaggcctgtggaacgtttgctcctcttctccttccggcccttggagggtggacccacgatgcagccccaactgccaacccccacccagcccatcagccaggcctctctgctgggtcaccttgggcaccatccctttgctgtgacagcccctaggggccagcccaggaccacataccacagacagcagccacatggagaggggtgtgccccctgtcgtctctggagaatggagtgacaactgagggatcattcaacctcctaaaatacagaaagagatagaaaactacacaggggaatggcacagcaaagcctctccctgaccaggtagataggcaggtaccacagacagaaggcggctcacaggatgccacccaagagatgtgtgtctccggcactgtcccagtgctcacccagcatgaggaacagaggcacctggccctggagtctctcccccaccaaccctttaggcctccacacccagcaaaatagcctgacaaggataatgggaaaccaaaaatgttactgggaaaaactgacattcctcccatcctaaaaccccctttctgaggctggggcaggccctataaccagcctaccctggcagccagcccgccagtgagcaagtgctttgacaacctctaacctatctgattctccaaaggggcagctgttatcatctccactgtacagcagaggcagctggggggcagggaggacagtccttatctgcagtcacacagcgcacagtggagaaggtccaggaggcctgtctcctgcttcctggcactctgagcctccaccagcaccctcttacccagagacgagtttctcacagtcatcgcagaagcagagagggtgacacatcttttggacggtatctttatcatggtcctcttggctcagaagtctctccacttctttctggttacctgatgcaatgtgctgaaaagtgacatccaagatgctatccacatgctggaattactcaattattaggagtaaattttttgagagtcctttttggtttttttgagatggagtctcgtcctgtcgcccaggctggagtgcaatggtgtgatctcagctcactgcaacctctgcctcccgggttcaagccattctcctgcctcagcctcccaagtagctgggattagaggcatctgccaccacacctggctaatttttatatttttagtagacacggggttttgccatgttggccaggctggtctcaaactcctgaccacaagtgatccacccatctcggcctcccgaagtgttgggattacaggcgtgagccaccaaacctggccgagagtccttttagaaatgctcatctatgtgtttatggatgaaatgatttgcactctggcatttcctttgtaatcatcttggtggtagggaaagtaggtgaggagagatgaaacaactgcacaatggtggccggctcattctactactctatttctggaaatgttaaaagtttcccataattaaaaaaacaatgacatgcctggagcggtggctcacgcctataatcccagcactttgggaggccaaggcaggtggctcatttgaggtcaggagttcgagactagcctggccaacatggtaaaaccttgtctctactaaaaatacaaaacttagccggatgtggtggcagacgcctgtaatcccagcgactcgggaggctgaggcaggagaatcacttgaacccgggagatggaggttgcagtgaaccaagatcgcaccattacactccagcctgggtgacagagtgagactctgtcacaaaaaataaaaacaaacaaacaaaaaaacaacatgacaaaatccataaagcaataggaatggcgggcagacaacacatctctgaacatcagtgtggattttgccacctcactagaaaaagcctcagccctgttcctcttgtgttctttttttttttttttttttttttcagtgaatccctacagggtgacaaataacagaatttatttatttatttttttagaaacaaggtcttgctatgttgcccaggctggagtagagtggcacaatcagagctcactgcagcctcaacctctcgggctcaagtgatcctcccaccttagcctcccatatagctgggactacaagtgcacaccaccatgcccagcttcatcttgttatttttttatttattattatttttatacttgctatggactaggggatcctcttttattctaatagagcatcagcctgtaaaggaaagagaatagctgcaatgagcaggaaaccccatcaacacacaaacctgcagagctcacctggtgcttcctggacgtgctcattccccaggacccactctggctccaggtcgcctggaagcacagcagcctcccccagggggctctgccctcgcccagcactcacggactgccctgcgggcacctcagcggcctgcctgtggccagtgtctgagcagggagctgcccccatgtgccaggtgaccagaccaccaggaagtcaggcaccgtgttcccaacccagtgcacacgcccataaacatctgacaacgggctcctcgagcccagcggaggcatcagctctgccagggctgccagcggaggcaccactgagctggcctggaggaattagtagtattgcgaggaactgagaaagcaagaggcctggcctgcgcccacagtgtgccgcccagcacagctacagcacagcacgctgggggaggtggggaaacatgccgctctcactctgccacctaggctggagtgcaacggcacaatcatagctcacggcagcctccaactcctggcctcaactgatccttccacctcagcctcctgagcagctaggactacaggtgcccgccaccacacctggctaatttttgtattgttttgtagagacgggtactcatgatgttacccaggctggtctcgggcttctggcctcaagtgatcctcccacttcggcctcccaaagtgctgggattacagaagtaagccaccccacctggccttgatcccaaatttaaaacctcagcattcctactgcccattctgagcacagaatggaacttcagggtttatgcagaccaccaccctgatcattttttttttctttttgagacagagtctctctgtcgcccaggctagagtgcaatggcatgatctcggctcactgcaacctccaccttctgggttcgaacgattctcctgcctcagcctcccgaatagtgagactacaggcatgtgtcaccacacccagctaatttttgtatttttagtagaggcggctgttgcaccatgttggccacacttggccttgaactcctggcctcaggttatcacccacctcggcctcccaaagtgctgtgattataggcatgagccaccatgcctggccaaccctgatggattttatagaggcaccaagagatgcagtgttcctcacccacatttacccacagagatgtcttggtatctcaccttaaacaggcagtcggtgggagacgaagtcatctgagagagtaagctcattctctgcttaaggaacagcctgtctccaaatccctcagactcctgcagggaaaaaaccaaacacaccacgagatgtcagtgcagatccttcaaaacccagcacctcagcaacaaccccggctgtctcttcagagcagtatcggctgcgcctctctcccgtctcatatgggacctgctcactgagacggaggacgggctgacgtcaggtggggagaaggcttcctggaagtggaggctttgacggttgctccctgtgggggatggggatggtggcggcaccctgactgcgtgtatatgtggaatgtgccatctccagcgtggaatgcggcgcacacacaccattgtcctccagatggaaactcacattgccgtggcctcccttcctcctcaagcctctgaccaaatgcctgcagagcccaattccctgctgtcttatctgaggcctttgggcaggaaagccatttcacaagctggtctcaatttcccactgtcaaccagcaggagagagaggggtcttgctttttggacgtgcctattaaataatatggccacatggccaggcgcagtggctcacacctataatcccagcactttgggaggctgaggtgaacggatcacctgaggtcaggagttcaatacgagcctggccaacatggtgaaaccaatctctattaaaaacacaaaaaattagcagggcatggtggtacatgcctgtagtcccagttacttgggaggctgaggcagaagaatcacttaaacctgggaggcagaggttacagtgagctgagatcacaccactgcactctagcctgggtgagagagcgagactccatctcaaaaataaataaataggccaggcgcggtggctcatgcctgtaaccccagcactttgaggggccgaggcgcgtggatcacttgaggtcaggagtttgagaccagcctggccaacatggtgaaacccctctctactaaaaatacaaaaattagccgggtgtggtggcgggcgcctgtaatcccaactactcaggaggctgaggcaggagaatcacttgaaccccgcaagtggaggttgcggtgagccaagatggtgccactacactccagcctgggtgacagagcaagactccatctcaaaaaaaaaaaaaaaaaaaaaggcaaaactctagatactttccataatactttatgaaatcatttctcgcaagacagttcaatgcttccttgagcacctgcaaccaaaccatgtaatgacaaattcgcttcctgaaaagggtcttggtgggaagtcaagggaattttctccagccagcggctgccagaaaacccccaaaccctgacaaatttgtggaataaggatgtctctttacagccctctaagttttgacttggaggtccacctaaagatagagctgacagcatctctggggataggccattcctggggtcctctgccatgcagggtcctcccagcagtcccccaggagggttaacttagcaaatgaacagcagcacctgtgagaggcacttctgcccccagctgctgtgtgccatataaagctctaacaatccactttacaccgcaattcacagctgaggagcttagggtcagagaaacatcacacattgttatccgggtaaatccagcactctttccgcaactctggttaacgatttagacagcagtgatgaagacaggtaggtctcccaagactgaatcttcagggaagaatgagctattggaagagagggggtatcagcaaggacttactaaagaaatgggtaaatcctttctatgagaaacccagtaacgtaaggaaggccagaagcatgcaaagctgcagacaagaatggtacaggttctttcttgtttttttatctgtttttttttttttttttttgagacggggtcttgctctgtctcccaagctggactgcagtggtataatcatagctcactacagccttgaactaccaggttcaagtgatcctcccaccttagcttcccaagtagctgggactaaaggtgtgccaccgtgcaccgctaattttttgtaaagatggcggtctcgctacattgcccaggctggtctcgaactcctggcctcaggtgatcctcctgcctcagcctcccaaagtgctgggattacaggcatgagtgaccaggcccaacccagattctttcaaagttctctctttttttcattcacaaaggtaactctagagtcatcccagtaatttattttcagaaagctgaagtcttcatttatgaacatgcttaaagaatgttgagcaggtgtggtggctcatgcctgtaatcccagcactttgggaagctgaggtgggaggatcacatgagcccaggagttcaagctcagcctgggcaaaatagcgagacctcatctctacaaaaaatttaagaattaaaaaattagccaggtgtggtggcacacacctgtagtcccagccacccaggaggctgaggcaggaggatccctttgagcgcaggagttggaggctgcagtgagctaggatcacaccactgcactccaccctgggtgacagagcgagatcctgtctctaagaaaaataaaagcttatggtcatctcaagtatattttgcagagaaaatttccatgaaactatattatataaaatcaatagtaaaatctaactggatgtcctcatatttagtccttaatacttttcagaaacctcttctgctgtgaggagatacacttgggatttttccctaggaaacaccatcaatacatagcaatgactctctacattcctaaagggaacttcattacttaaaccagtgagcagctaagacagaggccatgatacagacagaatcacaacaacaaggaagccacgacgcctgctccgtcaattacaggccacagtaaatatacgagcatctctcaatacctgcagggtgggcttcacagccagccgtgaggatgatgcatacctgtctcaaggtttcaccagaaccaaccatactccatccaggagggcagaaccagggtccaacaccctgacaacaagaggggtgccttgggctgtgaccctccctttcccatccaaactaaacactatccttaggggcatccttacaccccagatgcagagacaaacagacatgcccaagacatctgagcctataggagtggactcaggctgggcgcagtggctggtacctgtaatcccagcactttgggaggctgaggcaggcggatcacttgaggtcaagggttcaagacgagcccagccaacatggcaaaatcctatctccacaaaaatacaaaaattagccgtgcgtagtggtgcgtgcctgtagtcccaggtacttgggaggctgaggcaggagaatcgcttgaacccgggaggtggaggttgcattgagctgagattgcaccactgcactcccgtctgggtgacagagcgagactcagtctcaaaaaaaaagaaagactggactcaaaccctcaaaccaacaccagcacgagagaaggaacctctcaaatattactgccaatgtgcctgcaatattttctgaaataaaaggaggtgtgagaagccgatgtatactgtttggtcagccacctccttacaacctggtgaaggcctccacagaaaatgagaaagcagaagacagccacgctacagggagcagcaaggggatgggagcatctttgagaggtggacacctccttccaggtgaccagagacaccctgggcccagcaaggcacagcagagtgattcctctgcagggcaggaaagccggccagggagtgaactctcagaccaatctgtttcttgccctgcaagaaccagagggcagggcaaaaaccaccgcaggcacggtgagagaaacacaagttcccacagcctcatagaaaacaagtcaaactcacaactcttactccccagccttggaaatgaacagaaattctgatctgcacacacgcataggtagagacacaagagcacacacacacgcattcttttttatttatttatttatttgtagagacaaggtctcactatgttgcccacactggtctccaactcctggcctcgggtgatccacccgcctcagcctcccagagtgctgggattataggcatgagccactgcacccagcccacatacatactctagaatcttgctgatttccccctaaatatggaaacaaggcagaagaaagaaacttttcagaagagccacagccagccacatccgagatgcgatggatgacccccaatttcactggcagctgagtggggtgattaaatcagacttcagagaagagcagagattaattcttcaacaagtacctgaatactgtcaacgagtacagcgagatcatgatctaaaattttggttaaaaagataactgtgttcattccttgttaccgccaagtcacgtggaggcagaggctcaggtgtgttcaagattcagctgcgtccgtgacccaccgccatagccaaggaaggcattgtactgctacacctgtgacccactgccatggctgaggaaggtcttgcactgctgcacccatgacccacaaccgtggctgaggaagacattgcactgctgcacccgtgacccactgccatggccgaggaagacactgctgctggcggtgtaatggatgttaacactgatttacaaggggtgctgaaggacgccttcatccacggtggcctagcacatggaattcgccaagctgccaaagcctcagacgactgctgagcccatcttggtgtgcctgcatccaactgtgataagcctgcatgtgccacattagggagaccctaggtgctgaacaccaggtcaaactaattaagattgatgacaatgagaaacgaaaggaatgggtaaggcctctgtaaaacgacagagaggggagaccctatgaaggggctagctgcagctatgtagcagttaaggactttggcaaagaatctcgggccaaggatgtgattgaggagtgcttcacatgcaagaaatgaacgaataaaatgctggctcacatgcctcaaaaaaaaaaaaaaagatacaattgtgtatgcacagaaaaaaagacaaatgctaaaatattaataagtgtcacccctggctagtaagtttatgggaagtttttgttgtcttcactgccattttatagactgcaaatattatttgtaagcaaatattagtcttctaattaggaaaaaattaagctattcttttgggaaaaaaacagttctctctctctctctatatatatatatatattttttatatatatatacacatatttgagacagagtcttgctgtgttgctcagactagagtgcagtggtgtaacctcagctcactgcaacctctgcctcccggattaatgcaattctcctgcctcagcctcccaagtagctgggattacaggcacctgccaccacacccagctaattcttgtatttttagtagagacagggtttcaccatgttggccaggctggtctcgaactcctgacctcagatgatccacctgccttggcttcccaaagtgctgggattacaggcgtgagccaccgtgcccggcccagcacacaatataatttcaattatgtaaaatatacatgggtaggaaaaagactgaaaatgcatgaacgtgtcaataacgaatgaatggggtggaaatgcctgcacctgagagcacctggacaggctgatgctgtctcccagacgctttagctcatcattattttgggagattctacatcaaagtctgacaaagatgaatgttcaatccttggcactctcaccttataatacagagatcttttcattttatagatttcaactttgtgatttctgtatgatcacattttactcattggtatgtagtaaaacaggccagcaggacaaccatggttcaagattctcacgattcacatagaaatataatcacatcccctcgccgaccccagccaatgctcaataaaaaccaaggaaacaatggcaaggccactgagtcctcaaattgcacacattaatggtctcacagatggcagtggcagcccatcgggagtggctgctgcaaagacgtaagctgcagtggaggaagcgcggccaggtttgtgcactctgcagggccaacaggagccaggaacaggcaggagcccccatctcctactgagctggcagggcgggagccctgcactcccaggcgcagctgcagccgcccagccgcagctctggatccaggaatctctgcactctcaggggcccaggaagcatccctgccgccgcaggctcgtaagtgcctgctcccgctcctccccactcctggcaccgacttcaatttcagagcaaagctgaggccaagcccgggtactgttgcaacccagccatgtgtgcacatgcttggtgtgacactgacacaccagcctcctgatgcctcagacccctccaagattttgggcgctgatgagcatgggagagtagtcaaggtaggggctgagggcagctcagtgcaggcctgcagatgccccttggcacaaacagcctggatgcactggccagcatgttgatggtggcagaaggcagacacgcttctgggtggaaaggtgcaggtgcccagtgaagccccaccttcaagacagggacagcctaaagcctgggggccgggctgtcagtcccaagtggagtccacgacccagactgagaactcatggtgctttctccaggcccacctatggaccaatcagcacatactccctcccttctgagccataaaaaaccccggactcagccagactcagacagatgtcgggactaccaactgcaggaaggagctacctacgtcaggcctctttaactcgtcaggacgacctgcctgtggaaagaagctgcccactgtgggtctcctgagagctattctgccgttcagtaaagctcctctctgccttgctcaccctccactagtctacgtacctcattcttcctcgacatgggacaagaactcgggacccaccaaatggcaggactgaaagagctgtaacataaagagagctaaaacatgctcccgactcactacattgcaggtgacgagaggagagaagagctctggcccttcagggagcccaacctaggagttccccgagccagggctatgacaccctctttggggctctgcagttcctggtgtctccaagcttccaggccccactgtgttccccagtgcccaccgtggaagcggcctacagtacgcctgctctagctgcagccttgcatggagcaggaccctgtacaagcaacttggagctgcccaccccacctcagtcggcacacctggttgtgtgcagtggccagaccctgcacttgctcacatacccctcgccactccacacctggctcgcccttggcaggcatgggatccaggccagtagcacaagccgagcgcagcctgccaggccaagagcgtgaaatgagcccagcaggcccgaacaaaactcaggcaaaggagccaccagccacagaggtttccggctggaaaagcgacagtccagggatcccgtgacatcacttcttgactatcaaggtcaagaaatccaaattccctacttctggcttccctttgcacccacatgtctttggagaggatggggactaatgaagtaggatattaacaatgtaaatcccaatgataacccaccaatttttaccaccaattgagggcttggtgttctcttcactgagtgatttttaagactcacagccctcaaacagctgaggccccattcctgggaggcaatttaagaatccgtctgcccacataccaaccccagcaccctatcaagggaaccatgatgcccacaaaggaaggccagggcaggggtgagatcttacagggggtttagcagagaggcttccttgccgaatatattcaatggcagcttcgaatgaggtcaggcagtatcccagttcatcctttgccaagctgctaaacctgaagtttttgatgtaactcaaatttgccatcctaatgaaaggaagaaaaaagttatgttgttgtctatccaagtcacacttctgcaaaaaaaatatcattggcttgggcaactgatcaaatatctagtcagttggttcgctcaggaagctacgaccaccatcccctggatctctctgcagagtgtgtgcgattaggaacacaagtaaaatgactagctagttccctgaaatagtctttagcaagctgattaccgtaaactgagctgtgggttccaggggagagattatgggttttggggccagaaagaatggcaatcagctttctgctcaaccactgtctagacactcattccagaacaagaaatgtaagctctccgggccttggtttccccatctgtaagtggatggatgaagcaaggggaggccccacacctagctcgtaacaggtgtccaattgaagatgggcttttcctagagttacattagaactaccacagtgcagtgctgccattttttttttttgagacggagtctcgctatgtcgcccaggctggagtgcggtggcgcgatttcagctcactgcaagctccgcctcctgggttcacgccattctcctgcctcagcctcctgagtagctgggactacaggtgcccaccaccatgcccagctaatttttttgtattttttagtagagacggggtttcaccgtgttagccaggatggtctcgatctcctgacctcgtgatccgcccgccttggcctcccaaagtgctgggattacaggcgtgagccaccgtgcccggccaagcactgccattttcaaaagagtatcttaaaagaaaatgttaccaattagggatctccgttttcacaagcaagtataacaggactgatagcagatcatcagcacacatggtctccaggttcactgcaaaggggaaacacacattcaatgccatcatgagattcaaatggactgacaagcatatcaactccctaccaccgcacaccttgtgaaaccacgtatcagggagatcatacactgggggagaaatgtcattgcacaagctcctttacagcgtcctgatcagatgtcaggtccagggggaaaagaatgcccagcaatttcagaacatgaccaaaacaaggtattagtaactctagccagatacggcagcacgtgcctgtaatcccagtgctttgggaggccgagacgggagaattgcttgaggccaggagtctgaggccagcctgggcaatatagcaagacccccacctctacaaaaaaatatgaaaattagccaagggtggtggtgcatgcctgtaatcccaggtacttgggaggctgaggcaagaggatcacttgagcccaggagttcaaggatgtagtgatctacaaatgcacccagcctgggtgacagagtgagaccctgtctcttttttttgtttgtttgtttttgaaacggagtctcgctcagtcacccagactggagtgcagtggcgcaatcttggctcactgcaagctccgcctcccgggttcacgccactctcctgcctcagcctcctgagcagctgggactacaggtgcccgccaccatgcccagctaatttttttttgcatttttagtagagacagggtttcaccgtgctagccaggatggtctcgatctcctgacctcgtgatctgcccgcctcagcctcccaaagtgctgggattacaggtgtgagccaccgcgcccagccgaccctgtctcttaagaaaaaaaaaaaatatgttaactccaagcagaccatgccttgccacccccttggacgctgaaagagcccagggaggtggcttcagtgataaaaaatgaagatgagcccagagccatcacctaaagtctctttcttcctaaagtcaccaaggtccttcctaaggtcacttccattttatagacatggagtccactgcccatgtggagtttcactttttttccattttgaaattttaagtaattcattcacatttaaaaattcaaacaatacaaaagagcaaactgtgaatgttcctcccatccctgccagccagtctcttttcccagaggctcctgctgttgcttcctgcacatctgtccaggacagctatgagctcaccatcatatcgtggctaaacagctatcccccattctttgatgctgttggctggaagtctaccatatgcattcctgtttatttcattccatacactcaggatcatcccttatctacacatacagctatgtctcttccttactgactttttcttgacttgttttcttttacttcttcttttttttttttttttttgagaaggggtctcactctatcacccaggctgtagtgcactggtgtgatcatagctcactgcaacctccaattcctggcctcaagtgatcctcccaccttggcctcccaaagcactggggttacagaggtgagccactgcacccagccccataaaaatcccttaagacagcatcactctttgctttttcatctggatgtagcatctaccccttggccagtcccctttccaagcacaaacctctctggcttggagactgtgtaatgagctgcaccacttttcgcaagcagacaagcttctgctgtggggaggtgcatttgttcagctgagccagctctcttttggcacgaggtatgttaaagctgtaaaataatttggaaagtgacaacttcagagcacagtaagagaaccctctggcctggatctaagaacacatctcaggatctacacttctcacaacaaaccagaaggaatgaaacacaaaaacagatactgagaagtcatctgactcaagtcagcggcaaaacagaagagccttcaatcccattcaggctgccaggtgatagagttgtacaagaaaagctgaaaaaaaaaaatcctattcctagagggaaacaacccaaagagggttgtggtaggtgaaacatttttgtgtcctaatgaaacttaaattaggctcggcgcagtggctcacgcctgtaatcccagcacttgtaaaccagggtgggcagatcacttgaggtcaggagttcaagaccagcctggccaacatggtgaaaccccatctcttctaaaaatacaaaaattagcagggcatggtagtgtgcacctgtaatcccgctactcgggaggctgaggcaggagaatcacttgaactcaggaggcagaggttgcagtgagccgagatcacaccactgcactccagcctgggcgacagagtgagactttgtctcaaaaagaataaaaattaaagaaatgaattaactcctaagtaggtatctctatggcaaggttcccttgggtgggcaggtgggatgtcccctgcacgcagaacccacatgggcaaattacatgcccacttggggaccagctgcacaaaaccccgtgcccagcggctcccatccagctggcgtgctggtgcagtgtgggagggggacggccacacacagtcacctataaagggcagccctttatctttggttgcaagtaactgcgctgctcctcagaactaaccacatcaaaccagcgtgtcacctctgccaccgagagggcctgcttccgggagaagacagcacccctgcctctgaggacaccaagccgctgtggcgcaaacccttacctgaactccggtttcacaccaatatctttctgctgaagatcttgaaggcttcttgtgattttgttaaaggccgcatcctaacaacagattttaacgaaccttcaaatttctcaaaaagcacagaagaaggcttccatcttgggtgataataactgagaacctacctcacttgcctccatggtccccacgtatttaaagatcaggttgtaaatttcatgatggacgtatatctgtggaatcaacagaccccattcagggtgtgagcgggcaacagggtgtgcctcccagccactccgccccaccctcacctccactgcctgcttcatcaggttcatctgggcctcctgcttggcgagcattttctagagggcaagaaaagcacagtgaaagggcttggatttgcatgggggtgcaccacaattctccctctcagaagtcctgctgcttaccaggtgagagtccctcagaagctgctggaggcatttggtgtagagagcattcgctgagtcctaaaccacatagagcagagggacaggccacccttaccagcaaggccatgacgggggagccggagcgggtaaggcgcacagagcttcaagtgctaacacaagctttatgaagtcaattacgtgatttttctcaactttttttttaggtgtatatgcattaaaagcaggagaaacttccccttggggttaacacagaggataataatactcattgttatacttccccatgactttaccacttggtttgttttttctttttaagagacagggtctcactttgttgcccagagtagagtgcagtggtatgactatagcacgctgcagtctcaaactcctgggctaaagccatcctcccacctcggcctcccaagtagctgggaatacacgtgcatgccaccatgcctggctaatttttgtattttctgtaatgatggggtctttttatgttacccaggctggtcttgaactcccagcctcaagagatcctcccatctcggcctcccaaagtgctgggaagacaggcttgtaccaccatgcccggttaaactacttttatagttagagagaaacatttttaaaagacttcaaacagtgaggcagcaccaggcagttccagaggaaactgagggctcccagcaccctgcactgaaccgagacagggcacgccaggcagaggacagcacggctactgactatgtggtgacggaggctctttctctcgcattctcggaatgttcgatggaaagaggcgatgttcctgtcaaatcgctcggagtgtcttcccaagaactctctcacatcttcaatggttttcagggaaaagggatctgagggtgccaaaggctcttctgaaaaagaaacaaacaggtcaggccggctgaagcctctgctggttcctgactctgtcctatcctacagggcctaggccctctggggaggagggcaaatgtccttatttcaagacactacacaagaacagcccagttacaggacaccctggagtccagagagcctggtcctctcaaggcctcttcctgggacaaaaccaaactatctgggaccatgggcaagaccccaattcctgacaataagagcatcagtgtgcatccagcacattattatctcaattttctggggcaaatgaagacttattatttattaaaaataacgaaatctcaaagaggcacaatgctggggctgggcgctataagagacagccctgaagctgacacccagagacaaagctggggctactgctttgcataactcatgggggcaacagtcacatcccaggctgatcacaggtaggctgtctatgcgaatgctgcctcctggaattgtgcaatgcccgacctgtgcaacagcagccccgatccacacctccttagcccagtgactttaaagttctagtaggaaccactgaaaacaattatataggtctccatgtggctcttgaatattttccatgatgtttaaccttttttaaaaaaataatttattggccgggcgcagcggctcatgcctgtaatcccagcactttgggaggctgaggcgggcagatcatgaggtcaagggatcaagaccatcctggccaacatggtgaaaccctgtctctactaaaaataaaaaaattagctgggtgtggtggcgggcgcctgtaatccccgctactcaggaggctgagacaggagaatcgcttgaacccgggagctggaggctgcagtgagccaagattgcgccactgcactccagcctggcaacagagcaagactccatctcaaaaataattaaataataataataataatttattttattgtttttggagatagggtcttgttctgtagcccatgctagagtgcagtggtgtgatcatggctcagtgcagccttgaattcctaggctcaagtgaccctcccacctcagcctcttgagtaactgagactacaggcatgcaccaccatgcccggctaattattttatttttttactttttatttttatttttatcttttttttgaggcgtagtcttactctgtagcccaggctggagtgcagtggtgcgatctcggctcaccacagtctctgcctcccgggttcaagtgattctcctgcctcagcctcctgagtagctgggattacaggcacgcaccactgcacgtggctaattttttttgtatttttagtagagatggggtttccccatgttggtcacgctggtcttgaactcctgacctcaggtaatccgcccacctcggcctcccaaagtgctaggattacaagcgtgagccaccacgcccagcctactttttatttttgagacagagtctcactctgtcacccaggatcgagtacagaggcgtgatctcagcttactgcaacctccactttctgggttcaagcaattctcctacctcagcctcccgagtagctgggattacaggtgcatgccaccacacctagctaatttttgtatttttagtagagatggggtttcaccacattggccaggctgatcttgaactcctgacctcaagtaatctgcctgcctcagcctcccaaagtgctgggattacaggcgtgagccactgcgcccggcttgatttttttaatttttttatagagacagggtctcactatgtttccaggctagttttgaactcctggcctcaagtgatccttgtgcctcggcctcccaaagtgcagggattacaggcgcgagccaccatacccggccttgtttaacctttcaacagctaagtcaggaacaagttcaacaaacacatttttctaaaacaggagaaaaaggttttttctcccagaatacctgaactctctctcttttccaaaggatgggctatacacaggatgctgaaactctcttctttttcattgtagaaagtttcttcaaagagaatgggcactgagagaagacaggcaaaaccagctcctaatttaatcctgttcccttgaataaagacatcctggaaacaagaaagccatcactgcaccagcagccggggcaaccacatcccactctcagcctggcccccgatgcagcacttaaccagaccctacggccttcaccccattgtgggtttgctggggcacaaatactctcctgttttgctcattttgatactaaaatgtttcctctttgttggcctagtagctatggctgcaagatacctgaatcatttctattttcttttgagacagagtcttactccatcacccaggctggagtgcagtggtgcgacctcggctcactgcaacctccgcctcccagggtcaagcaattctcctgactcagcctcctgagtacgtggcactacaggcacccaccaccacacccagctaatttttgtatttttagtagagacacagttttgtcatgttggccaggctgctcttgaactcccagcctcaggtgatccgcccgccttggcctcctggagtgctgggattacaggcgtgagccaccacacctggcccacacgatgcatttgttcatcttttcagtttcctttatttggaacagtgcctcggtctttctttgcctttcacgacattgacatttttgttgcgtatcgcagactctccctccgtgtgtttgggagggtttgtctgatgtttcctgacaattagattacggttttacagttacacgtttctgataggaatgccctgaaagggatgttttatctccctctgtgtatcctgttggaaggcacatgatgtcagcttttttcactgttgatgttaaccatggggtatgtgtcgttttgttttgttttgcttttaaagcggaagcaggtaggttctgagagggggagattttattcccattcaggaatggccctgtttttcccggcatccccatagtcagggaagcccggccacagtgtcctcactggggcaggggctgtgttcagatgcggcagctgaggtttgtggcgctgtgacagggagaggaagcacggggttgtcagtgcatctgctctgccctgtggctcacaagacacactgctgttttcctgctagagatctgctcaccccagctgtcagtcagcttagttgatttgttctcttttggacacctagatctacaaaaaggacaggagtcgggctttgcgcagctggtctgcccccagcacccggccatgaccacagtaagccatgcagggagtagcaggtgggattcagccctggccacactgcagcacaagattacttccatctcttagatagggagagctttcttaccttttcttttcacaaagaacacagaatttcttctcctaaagaaacagctcaatgttttttctgttgcaacatttaaaaaggatccaggccgggtgcagtggctcatgcctgtaatccaagcactttcggagaccaaggtgggtggatcatttgaggtcaggagtttgagaccagcctggctaatatggtgaaaccccgtctctattaaaaatacaaaaattatccgggcatggtggcgagtgcttgcagtcccagacactcaggaggctgaggcaggagaatcacttgaacctgggaggcgcaggttgcagtgagctgagatcaagctactgcactccagcctgggtgacagagtgagactccgcctcaaaagaaaaaaaaaatgtagtgtgtgattctagagctaagaagaagttttttttgctatgaaagatataattggtataatcagcacagtctgtatgaggacaatatgttggaggacattctatcaatgctaaattatctgagtgtgatcattgcgttgtggttacataagagaatgcctgttcttgggaaatacacactgagctgtcttgggctaaagggcacagtgcctgcaacttactctcaaaagattcaggccaggcgcggtggcgcacgcctgtaatcccagcactttgggaggccgaggcgggtggatcatgaggtgaggagatcgagaccatactggctaacatggtgaaacctcgtctctactaaaaatacaaaaaattagctgggcatggtggcgggtgcccgtagtcccagctactcgggaggctgaggcaggagaatggcgtgaacctgggaggcggagctcgcagtgagctgtgatagcgccactgcactccagcctggtgacagagcaagattccatctcaaaaaaaaaaaaaaagattcaaaataataataatatgtgttgagagacagcgataaaaccaatgtggcaagaatgttaacagcttggggggaagcacatttaagagttttttcaactttactaaaacatttgaaattatttcaaaacaaaaagattgttttttgggtttgttttttttttttttttgagacagggtctcactctgttgcccaggctacagtgtggtgacacaatcatggcttactgcaagctcaaactcctcagcttaagcaattctcccacctgtgccttccaagtagctaggactagaagcacgcaccatcacgcctggctaatttttttatttttatttttggcagagatggggtctcgttatgttttccaggctggtctcaaactcctggcctcaagtgattctcctgcctcggccccccaaagtgctagaattataggcgtaggccaccatgtccagctgaaacaaaaagcttttaaaaactaaaatattcatccctgatgtcctattcgggaccaagacactgacaagcttttcacggcactgggataaaacaacttcctttggctcggacatcagcaaggaggaggtgttccagcgacacacggcagaaaccccatcacgggatcagagagagatgcttggcacctcccggcctccaagacagcagctggggtccagcttaccatcactacctccctttcctccaccacaaaggcagggtccctccagccccccacggggctgcagtgtgtgtcaaatgccaccattgccagtagctgtgaaaggctgagaacgggactctcttcctcccctctggccccaaacaccgagtaggtgaccctggctgatccaccaagaaatgaatacctttccatttaaggtctgaaaatgctcttccacaggtatcaaaatgtaggactcaaactgacaagtagactggatgctgctcgacaggcttcctttgcagggtactaagacctggaaaaaacaattcggggcaacattagacagacgtgccatttaccacctcagcagaacaaggtgtccccaaaggcgctccagctggacacacagcgggacctgctggcagagagaacgcccgaggtcccttgccaacacggccacagtggctgccagctgaggtgatctgctgctgctgttgttgttgttgttgctgttgtgatggaatcagcctcaccccaccacaggcagagggaggaggcgaacagtacaaatccttctccaccttcagatgtggaggctgacggctccttcctacaatcgctgggtcccccccaggctagtggccccaggctccctctctattcttaacagcacagttataaggacccaggggctcagggacaagcccagatgaagagaggagcatttggaaagtacagaaaagggaagctaaaaaatcacactttctcccaccattcaaaaaagaaacatggccaggcgtggtggctcatgcctataatcgtagcactttgagaggccaaggcaggcggatcacttgaggtcaggagtttgagaccagcctggccaacatggcaaaaccctggctctactaaaaatacaaaaattagccgggggtggtggcgcacgcctgtaatgccagcactttgggaggctgaggcaggcagatcacttgaggtcagcagtttgagaccagcctggtcaacatggtgaaactctgtctctactaaaaacacaaaaattagccaggtatggtggcatgtgcctgtaatcccagctactcgggaggttgtgcttcagcccaggaggcagaggttgcagtgagttgagatcacatgattgcactactccagcctgggctgcagagcaagactctgtctttaaaaaaaaaaaaaaaaaaaagaacacttcacatggatgatggtttccttctattcttttctttacgcttttatttattttttttttttggagacagtgtcttgctctctcaccgaggctggagtgcagtggcgcaatcatagctcactgcaccctcaacctctgggctcaagccatcctcctgcctcagcctcgtaagtaactgggacaacaggtgcacacaaccatgaccagcattttttttttaagtagagatgagatctcactattttgtccaagctggtcttgaatccctggcctcaagcgatccttccaccttggcctcccaaagtgctgggatgacagtcatgagccactgtgcctggtccattgtattattctttgtttgaaattaaacataataatctgaaattttaataaaaaattaaaataaagggaggcccttagatgttaggctagaagaaatgacctcaaggctcccaagtggcctcaccactgcagttggcagacaaagaaagaagatcctagaggccaaagtgggccacaggcaatgggatctaaagagccagtcctcgggtatttaatgcttgaagtcagagatggccccccctccagctgcagcatgaaggactcacaccatcccattcaaggaagggccgtggctggagggccttcatgtggcctctgggaagcaggaacttctttttttttgagacagatctcgctctgttgcccaggctggagtgcagtggcgtgatctcggctcactgcaagttccgcctcccggattcacacgattctcctgcctcagtctcccaagtagctgggactacaggcgtccgccaccacacccggctaatttttttgtatttttagtagagacggggtttcaccgtgttcaccaggatggtctcgatctcctgaccttgtgatctgcccacctcagcctctcaaagtgctgcgattacaggtgtgagccaccacgcctggcctcgaagcaggaacttctaaggggcctcagagaactctgccccactgtgcccacatgctgcccgcttgtttgcatcaccttctccgcctccctgacttgcataatgcacgtctggccccattcactgcatccccactgtcaagcacactgctggacacgaggcaggtgcccagtgcatgtttactgggtaaatcgggggccctcaggaccaacccttcccccaactagttttctggcagacataaaaaggagctctagttcctcctatgccaagaaagagagaggcccctgctgcccagagcatttcatagcaaccagaagccaacgctgggctccctggctccacccaccatccccacagcaatcctgctgagaccggggaggagttgcctgggatagggggtagagagctaggccaacggcctccaggctatcccttagggggcttcagactacttctggagtagctgtggagtttttactgctggcaaagactttccagagttaccggcatagacgaagttcagagttactgcgttgaccagaaggtggggacccagaaatttcaaggcttaaccaaaaaatggtttattctagcccctttagaaagaattttttaaatcacagtaattaaagaaaggccatgtgtggtggctcacgcctgtaattccaacactttgggaggctgaggcaggtggatcacctgaggtcaggagtttgagaccagcctggccaatacggtgaaaccacgtctctactactaaaaatacaaaaattagccaggcgcggtggcaaccgcttgtaatcccagttattcaggtggctgaggccgggaggcagaggttgcagtgagccgagatcgcaccactgcattccagcctgggctacaagagcgaaactccatcccgggggtagggtgtggggttgggggaaagaaagtcctgcaggagctgcattttatgaggaaaaacaaaaggagacaggtgaggtggctcacgcctgtaatcacagcactttgggaggctgaggcgggtggatcacttgagtccaggagttcgagaccagcctgggcgacagggcaaaaccctgtctctacaaaaaatacaaaaattagccaggcgtggtggtgcacgcctgtagtcccagctacctaggagactaagacaggaggatcacttgagtccaggaggtggaggttgcagtgagccaagatcacgccactatactccagtgggagtgacagatcaagaccccatttcaaaagaaagaaagaagaaaagaaaagtcaaataaaaggcaagaatctgcctgagtggcacctactccagggcactctcctgcttcttccccaggctggattaagcactccacaactgcccacgctgccttctgtcctgatattcctctggcctgcaaatggcctgttctggaattccctgaaggcgtgccaagttccccattgatcgtgtaaccctgaaacctggcacggtgcctggcgtggagtggatggccacggcttgttggaagcatctatactaaataaattctgagaactggagcaggggtctcagcgcccttagctcggatgaaagttagttcctggggcttagaagacatgctgctaggctcccagactaggcccccggagcctacttaccccattaaatcagacaactcaataaaagaaccaagttcaatctcctttgaaatttttgtttttcctgtaggcaaaggggccagtctcctggtgcacctgggaaacctggaggactttcaactctgcactaaagccccagggacgcagacctgcccagcctgctctgaggacgccacaggtgtgtaattagccggatagttgtaagcacagaggtgacttttagaagcagtggggttgtcacaggcctctgaaattgaaatttgaaatctgggtgagcacaggagaaggcgcttccactgtccaatcagatagcagaggagggcaggaaggagacacctgcctggatgtgggggcatccccacaaaaggagcacctgcgaaggaaggcgcttcgaggcgtggcgtggcgggggcggggacggggtgggggtggggagggaaggagcagtcaagctgcaccctcagctgccccacacacactgctgcagggccacatggagatgaggcggcccagcagcgtgcacgcagggagaagcgtggtgcggttcactctgcgggagacacatggttttttttgtttgtttttgtttttttgagacagagtctcgttctgctgcccaggctggagtgcagtggcgtgatctcagctcactgcaacctccgcctcccgggttcacgcgattctcctgcctcagcctccccagtagctgggattataggcatctgccaccacgcacggctaattttttgtatttttagtagagatagggtttcactatgttggccagactggtctcaaactcctgacctagtgatccgcctgcctcggcctcccaaagtgctgggattacaggcgtgagccaccatgcctggccaagacatgtttttaagtgatttcacattttttggagcctgataaaggactctgatctccagggcagactcaagggcagtcaaacttggtacaaggttatgaccagcctgggcaacatagtgagaccccatctctaccaaaatattaaaaatgaaataaagttggtacaatgtccaaacttcatggaaagatatttggcattcaactgctgaggccacagggatcccttagaggtgacagaaaggatggcattttcctggagaccatcgagatattcgactttttctttcaatctatgaacataggtagagcacaactgcggactggacaggtgtgggtccatgtccctcctcacacggacaagagggggccggcatgggccagcaaacctgaccagtgtgacagtgacagcagctcctgcactctgctgatttctgctgagatgctggcctccctgattctttttttctttttttttagagatggtgtctcactatgttgcccaggctggagtgcagtggctatttagaggtgcaatcccactgctgatcagcacgggagggttttttgtttgttttgtttgtttgtttgtttgttttttgagatagagtcttgctctgtcacctgggctggagtgcagtggcgcaatctcagctcattgcaacctctgcctccaaggtacaatagattctcatgcctcagccatccaagcagctgggattacaggtacgcaccaccacacctggctaatttgtgtatttttagtagatatggggtttcaccatgttggccagtctggtcttgaactcctgacctcaaatgatccgcctgccttggcctcccaaagtgctgggattacaggcatgagccactgtgcctggcaaagcacaggagttttgacctgctctatttccagcatggcagtgttcacccctccttgggcaacatggtggtcccccattcctgggaggtcaccatattgatgccaaacttagtgtggagatgcaatcagcatagctcacgacatcccagagctcctgggctccagcgatcctcctgcctcagcctcctgagtagctgggactacaggcctgcaccaacatgcctggcaacctcactgattcaagtccaccaaacaaggctgaggaagacaagaggctcactgctgccccatgtggaccccagcagttccttgtggatgccttggatctcaggaggagctggactgagggtctggggttctgtggggcaaccctggatggcacagcctaagaagaatctccattctccggtgtccctgaaaggaaggtgacaaggcagaaaagttcattcaaaatcccccttttgctaaagtgggcttgagtgggatcccatgacttgtagctgaaaagcacttagttggccaggcatggtggctcatacctgtaatcccagcactttgggaggccaaggcaggaggatcgcctgaggtcaggagttcaaggccagcctgggcaagaaattgagaacgccgtctctacaaaaattacaaaagttaggccggacacagtggctcacgcctgtaattccagcactttgggaggccaaggcagatggatcacttgaggtcaggagttcgagaccagcctgctcaacatagtgaaaccccatctctactaaaaatacaaacatcagtcaggcatggtggtgggtgtctgtaatcccagctacttggtaggccgaagcaggagaatcgcttgaacccaggaggcagaggttgcagcaagcccagatagagccactatactccagcctgggcaacacagtgagactctgtttcaaaaaaaaaagaagaaaagaaagaaaagaaagaaaagaaagaaaagaaagaaagaaagaaagaaagaaagaaagaaagaaagaaagaaagaaaagaaaagaaaagaaaagaaaagaaaagaaaaagaaaagcctgaagtggcagctgccaggctcactaacaccatgctgagcaagatagagcttccccaaagagcttccacagaaataactatgccacagtgtgacagttctaaaaagctggataaagatatatatgaaaatatgcacttgtctagacagtagtttaaaatatcatacaacgaagacaggaagagaggaaatattcccgcagtacggccaggccctccctgatccatgcccaccttgcgtcccgtacttttcctctgcgacactcaccaccaccgtaattagtatgcactcgctcagtgaatgaccatctttcgcactagaatttaagctccatgagggtaaagatggtgatctagggccaggcgtgacagctcatgcctgtaatcccagcactttgggaggctgaagcaggaggatcacttgaggccaggagttcaagaacaacctgggcaacatagtgagaccccatctctacaaaaaataaaaaccagccaggtgtggtggcacatgcttgtagtcccagctacttgggaggctgaggcagaaggactgcttgagtctagaggtttgaggctgcagtgagccgtgttcatgtcactgtattctagcccaggctgggggacaaagcaagaccttatctcaaaaaaaaaaaaaaagagtgatgtgtgtttctgtttcttggtgaatcctcaccatcaagcaaagtatcttgtatacagcagcttttaataattgctgtgaaatgaagagatgacagtgaatgtctttggtgaattttatgagatttttatttggaaagagctatatattctaatttttaaaataatgaactttttggcttctaaaatctaaagtaagaagattgtggtgaagaaatatgaatcacaaaactaatcataaaaactggaaaagatgtcaagaaacccagcttctctttgggagatggaggtgggcggataacttgaggccaggagttcaagaccagctgggacaacacggtgaaaccctgtccctactaaaaatacaaaaattaggccaggtgtggtggctcacacctgtaattccagcacgctggggggccgaggcgggtggatcacgaggtcaggagatcgagaccatcctggccaacatggtgaaaccctgtctccactaaaaatacaaaaattagttgggtgtggtggcacacacctgtagtcccagctactcaggagactcaggcaggaaaatcgcttgaaccccggaggtggaggttgcagtgagtcgagattgcgccactgcactctagcctgggtgacagagcaaggctctgtctcaaaaaaaaaaaaaaaattagccaggcatggtggtttgtgcctgtaatcccggctactcaggaggccgaggcaaatcacttgaacccgggaggcagaggttgcagagagtcgagattgcgccactgcactccagcctgagcaacagagtgagactctgtctcaaaaaaaaaaaaaagaaacccagtttctgatggcagagcttggcctgggcaaaatcaaagtcaagtccaggccagacacagtggctcacgcctgtaatcccagcactttgggaggccgaggtgggcagatcacctgaggccgggagttcgggaccagcctggccaacatgggtgaaactccatctctagtaaaaacacaaaaattagctggacgtggttgcacacacctgcaatcccagatacttgggaggccgaggcaggagaatcgcttgaacctgggagacagaggttgctgtgagctgagatcacgccaccacactccagcctgggtgacagagcaagactctgtctcaaaaaaatttaataaataaaaataaaaataaatgaaagtcaattccggcgtccgagaggccgctgagaacctgaagccacactcagctaacctgacttctccttcagttcaaaccctcaggcacctcacatatctaagtaaagtcgccccacgggataagagaagtggacatccatttgagagagtaggggacaacagacaaaaagaagacggaagactcctgaagcagaggccacagatgacacaaatgcacccgggacactgtgtcccccagtgccgtctaagtaggatgcccgccaagttcactgacctgagaactggaaagacccacaatgtggggcccgcccccgtccaggcagatgcccccaccatgacaggcgacagcgtctcctgcctgcttctcattcctgttacctggctgcccctgaaggcttctgaggttgtggcctctaccagaaaagttctttcatcatggtgctttccctttggaaaaacctttcaaagcagtgtatgaatgtgtttactcggtcccttattctatgagggtgagcacccacctcccagacagaccaggactcgtaaggccccagggagcacaactcattttagccctggagaagcctccataggcaagagagaaacgagagcaccgcagcgtgagaccaagtgtcactgggggtgctccacgaaagggcacagttagccacaggcgggggccaggagttcagagaaagtattacagcctggactgcagtcccagaaggcttcctggagggagcggctcatgggggcccctcgctgctcactcacagaccaagcacactgctgggagcttgttaagctgagtttataacaaactccctccaaactgagccttagtctaccacgtctctggaaccattcatgcctcaggacaaccccgaggctcagtgcacttacaatgccatggatttgggccactttgctgcacaagtcagggcggcacttttgcagagccagatagaaaggatttttcaggaggtcttcatcatacagagccatatggacttcagatgggtcagagcaaatctcctgcaataagggagggaaaagcagtgaatagccattttcgagtttacgtaacacatgaaagtctgcatctgatgcatctggcattttctttttctttttttttttttttttgagacagagtctcactctgtcgcccaggctggagcgcggctcagcctcgggagtagctgggactacaggcgcccaccaccacacccgcgaatttttgtatttttagtaaagacagggttttgccatgttggccaggctggtcttgaactcctgaccagcaggtgatctgcccgcctcagcctcccaaagtgctgggattacaggcatgagctgtcacacccgacctgcatctggcaatttctaaagagtatcctccaaataaaaaaggattcatgacgtgccatttttttctcccacagactcactccaccaggaaatctcaaatacaacccactaattccaagatgacccgtttattggctaacgtgtaaattatgctcagaaaatcttgttaaactccaagtcttggctaaagtataaatggctatttttagaatatcctacatgaccaaaattatgacattctcaagatactcatttatttttaatgaaatattttagcacatggaaaagtactgagtaataatgcaaacctagcaccagaattaaggaatcgtcacattttgccatgtttgcctcagattttcttttaagaaataaagtggaagccaggtgtggtggttcatgcctgtcatcccagcactttgggagcctgaggtaggaggatcctgtgagcccaggagttcaagaccagactgggcaatacagcaaaaccctcacttctacaaaaataaacaatttatctacaaaaaaaaccaattatctacaaaaataaacaataaaaataaacaattatctacctctacaaaaattaacaattatctgggtatggtggcatgtgcccgtagtcccagccactcgggaggctaaggcaggaggatccgcttaagaccaggagttggagaccagcctggacaatatagcaaaacactatctcctcaaaaattaaaataataaaatttctgttagtctgtgctatggtctaaatgtttatgtcccccaaaaactcatatgttaaaatactaacccgctaggcggggcctttgggggtgattaggttacaaaggcagagccttcatgaatgagatcagtgcccgtaattatgcagccgggcacagtggctcatgcctgtaatcctccctttgggaggccaagtcgggaggatcacctgaggtcaggagttcaagaccagcctggtcaacatggtgaaaccccgtctctactgaaaatacaaaaattagctgggtgtggtggtgcatgcctatagtcccagcttgggactgcccaggaggcagaggttgcagtgagcagagatcacgccaccgcactccagcctgggtgataaagcgagactccgtttcaaaaaaaagaaaaagaaagaggcctgggagagctcctttgctcctccggccacgtgaggttacagagaacagacagctgtttatgaagcaggccctccccagacatccaacctgcaggatcttcaccttgtacttcccagcctccagaactgtgagaaacacatttctgtcattttcaagccttctattacagcagcctgcatgggctgagatagtctatgagtataaagccatatcccactgtttttcattttcattggttcattaattaaatgaactaaatttctttcggttatgtaaactgcctgatcatgtcttttgctcactttcccgctgggttgttggcctttttcttaggatttatagttctttacacatctgtatactaaagtaagttttaaatatcatctcccaggctggctgtaatcacagcacctggggaggatgaggtaggaggatcacttgaggtcaagaggtcaagaccagcccaggcaacatagcgagaccccatctctacaaaaaaagttttaaaaattagccatgtgtggcagcccatgcctatagtcccaggtactaaggaggctggggcaggagaatcacttgagcccaggaggttaaggccgctatgagccatgatcacgccactgcactccaccctgtgtgatggtgcaagatgctgtctaaaaaaaaaaaaaaaaattatacacacacacacacacacacacacacacacatatactcacaccatctcctagtctgtaacttgctttttcattttgtcaaatgggtgtgttcagaaatagaactttggatgttatttattttgagacagggtttcacactgtcgcccaggctagagctggagtccaatgacatgatcgtagctcaccgtaaccttgaactcctgggctcaagtgatctcccacctcccacctcagcctccagagcagctgggactgcaggcatgcaccaccacgcccaaccttttttttattttttactttttgtagagatgagattttgctgtgttgcccacgctgaacttgaactcctggcctgatgcaatcctcccacctcagcctcccaaaacgctgggattacaggcatgagtcactgtgcctggccagaagttttgatgtgaatggaccgtcatccctcagtatacttgggggattggttctgggatcctcttgtatacccaagtccatacatactcaaatcccatggtcggccctgtggaactcacatgtctgtgtcagccctccatatacagaaatttgcaacctgtgaatatggtattttcaacctgaatttggttgaaaaaaacacatataagtggacccacacagttcaaacccatattgttcaagggtcaacaataattggatttgccactctttgcttttaaggtcagtgctttttgagccttaagaaatctgtaattggcatgcctatcctctggcaggtctttttgcaaagtgacttcactattcccccatcagaagatagagtaggccaggcacggtggctcacgcctataatcccagcactttggaaggccgaggcaggcagaacacttgaggtcaggagttcgagatcagcctgaccaatatggcaaaaccccatctctacaaaaatacaaaaattagtggggtgtggtggcatgtgcctgttatcccagctgcctgggaggctgaggcaaagaatcgcttgaactcaggaggcagagattgcagtgaccccagatcctgccactgcactccagcttgggcaaaagagaaagactcagtctccaaaaaaaaaaaaaaaaaaaaaaaaaggaagtagactcatttccgcagcccctgaatcagagccagccctgtgacttgcttcaaccaacaggcagaatcgatgctgtacaatttgtgagtgtcagcttcaagaggtcttacaggggctgggcacaatggctcactcctgtaatcccagcaccttgggaggccaaggcaggaggatcacttcaggccaggagttcaagactagcctgggcaaaatagcaagaccttgtctctacaaataataaaatacaaaaattatccaggtgtgctggcacatgcctgcagtcccaactactcgggaggctgacatgggaggatcgcttgagcccaggagtttgaggctgcaatgaactatgattgaaacactgcactccagcctaggcaacagagtgagaccccatctctttaaaaaacaaaaaaaaaggccaggcacggtggctcacgcctctaatctcaacactttgggaggcctaggcgggtgggtcacttgaggtcaggagtttgagaccagcctggacaacatggtgaaaccccgtctctactaaaatacaaaaattagccaggcgtgatggcatgtgcctgtaatcccagctacttgggaggctgaggcaggagaatcacttgaacccaggaggcagaggttgcagtgagccgagatcacgccacttcactccagcctgggtgacagagtgagattctgtctcaaagacaaaacaaaacaaaaagtcttagtacattcaagaaataagaaaagtaaatgtatatacatacatacacacttataaaagggcttgcggattccattctcattctcttggtaccccaagatcccaatgctatgaagaagcccacatgatgaaaggccatggggggagagcgaggcctaggtggcccagcaagcacagccaacccaccagcagaatacagccccttgagggatcccagctgagaccagtagaggaaccacccacccaactcacacaacgtaggaagtaataaattgtggcagtttgaagtcactacattttgggtgggtttgttacacagcaaaggctacctgaaaccacgtcctttccaatttcaaagccataaagatagtccttatgatttctaaaaagagtaaagttttctatttttaggtcttcaatccatctggatttttgtacatgctataaatcaagtgtctaattatatttctccatatagtaagccaatcgtcccatcatcattttttgaatattctatccatttcacacaggttgataatgctacggctgtcacactccaagatcccacgtatgtttagcctgtttccaggctctactctgtttcaagggtcttactgtcacatgtgagaaatacaattatgtatatattacatagaaatacacaatgtcattttaaattttctagtagcacattaaaaaagaaatagggggccgggtgtggtggctcacgcctgtaatcccagcactttgggaggccgaggcgggcggatcacgaggtcaggagatcgagaccatcccggctaaaacggtgaaaccccgtctctactaaaaatacaaaaaattagccgggcgtagtggcgggcgcctgtagtcccagctacttgggaggctgaggcaggagaatggcgtgaacccaggaggtggagcttgcagtgagccgagatcccgccactgcactccagcctgggcgacagagcgagactctgtctcaaaaaaaaaaaaaaaaaaagaaagaaatagggtgcaattaattttaatgatatattttatcttaatatatccaaaatatgatattttcaacatgtgaccattatttattttgttttttagagacggggtcttgctatgttgcagtggctattcacaggcacaatctcagctcaccacagccctgaactcccagcctcaagcagtcctcccatttcagcctcccaagtagctgggaccacaggtatatgtcactgcacttgacttgatcattatttaaaagttattggctgggcacagtggctcacacctgtaatcccagcactctgggaggctgaggtgggtggatcacctgaggtcaggagttcaagaccctggccaacatcatgaaaccccgtctctataaaaatacaaaaattagccaggtatgatggcaggtgactgtaattccagctacttgggaggctgaggcagaactgcttgaacccaggaggcagtggttgcagtgagccgagattgtgccactgcactccagcctgggcaacagagcaagactccatccccaaataataataataataataataataataataataataataataaaaagttcttcatgatggccgggcacagtggctcatgcctgtaatcccaccactttggaaggtcaaagcaggtggactgcttgagtccacgagttcgagaaaagcctgggcaaccccatctttacaaaatacaaaaattagccaggctactcgggaggatgaggcaggagaatcgcttgagcccaggaggcagagactccagtgagctgagattgcaccactgcacagcagcctgggtgacagagtgagactctgtctcaaaaaaaaaaaaaaaaaaaactgttattaatgatatattttacatttttttattcttaagtctttaaaatctagtgttcattttacatttacagcacttctcgattcatactagccacatttcatgtgctcaatagccactagcagctattacactggacagggcagggagagaccacatatgaacatttattttacatgactacagcttcataataagccttactaactcacagagaaaagctcccctccagcttgttctccaaaggttattccttgtcctttacaatatcaaatgaatcagaatcaccttgtcaattacatgaaaaatcctattaggatttttattggacccgcactaaattcatgaattttttttttttttttttgagacagagtctcgctctctcacccacactaaagtgcagtggcacaatctcagctcactgcaacctttgcctcccgggttcaagcaattctcctgcctcagcctcccaagtagctgggattacaggcacccgccaccacaccaggctaatttttgtttgtttgtttgtttgagacagagtcttgctctgtcacccaggctggagtacagtggcatgatcttgactcacagcaagctctgcctccagggttcacgccattctcctgcctcagcctctcaagtagctgggactacaggcgcccaccaccatgcccagctaattttttgtatttttagtagagatggggtttcgctgtgttagccaggatggtctcgatctcctgacctcgtgatccgcccgccttggcctcacaaagtgctgggattacaggcatgagccaccgcgcccagcctgccgttttttttgtttttcgagacagaggtcttgctctgctgcccaggctggagtacagtggcgcaatattggctcactgcaacctctgcttcctgggttcaagcaattctcgtacctcggcctcccaagtagctcagactacagactacacgccacaacaccagctaactttttgtgtgtattttttggtagagacggggtttcgccatgttggccaggctggtcttgaactcctggcttcaagtgatcttcctacctcggcctcccaaactgttgggattacaggcgtgagccaccacactcagccctataattatgaattttatcatccacatacatggtatatctttccatgaatgtcttcttcgatgtcctccgacttttccataaggatcgtatacgacttttattagactatttatatattctgtatagactttgctgctgttgtgaaaggggttgctaaaattagattgcttattttaggtaaggttctaaaagcaaaagccaaatggacttacatcagagtcacgctgtacagataaaataagaatcagtatggaacacacctaccactaccatcagaactgggacttctgaagccagagaagacccttccatgattcatgactgaaaggtctgtgaacggccaaaagaagattacaggtcagtgttcaactcactttaggaagtaagctgtttgaaggatgttgctgtctgcagactgctccatgctgctaactaatgtgaaccagtgctttgtgtgtttcatgaaacattctatagctgctcctcatcacccctggtctgctcctctgagccaatgagctctcagagggggtgcctacaaaatgggcacagaaaaggaaatcagatttctatttttttttttttttttttttgagacagagtctcactctgttgcccaggctggagtgcagtggtgcaatctcggctcactgcaacctccacccctgtgatcaagtaattctcctgctgcctcagcctccctcgtagctgggattacaggtgtgcactaccactcccggctaatttttttatttttagtagagacggggtttcatcatgatggccacgctggtctcaaactcctgacctcaagtgatccgcccacctcggcctcccaaagtgctgggattacaggcgtgagccaccatgcccagccaggagatcagatttctaaccacgtcatcccacctctctgagcctccatctgggcctgcaccacagagaatgctaatacctgtctgcaggactcttatgagggtcatttccatgccaccttcactatctgtgacatgcagtactgcatatcaacatagcaccagttactgcaagctcacatgggacctttgtgagaattagaaacaggcacccgacttcccagggggcgcagctctgtgcaagggcactaggctagtgagcagctcctaggtaacatgctgcacggcccctgctgctgggcagtgaacaacctgcccacaatgtgagcacaattttgcccaacaattacacataatggctctcttgctagtgtttgacattttccttcaataacttattgtctttataaaaatgtattttcctttctgttttatttttgtttacttttgtagaaatggagtctcgctgtgttgcccagggtggtcttgaactcctggctcaacaggcatatgccaccatccttggcctaaaatttattttaaaaagaaatcttattactactttaaatagaaaaatggtatcacttccaacgaagagaagatcatcttaaagttaaaaattataaaggtaattactgttatttaaaacctcataatcccagcactttcggaggccgaggtgggcggatccagcctggccaacgtggtgaaaccccatctctattaaaaatacaaaaattagccgggcgtggtggcacacacttgtaatctcagctactcaggaggctgaagcaggagaatcgcttgaatccaggagatggaggttgcagtaagccgagatcatgccattgcactccagcctgggcgacaagagtgaaactccgtctcaaaaaaaaaaaaaaaagtcattagatgctaagcttgagcctggggccttctctcttcattaaaatgagaaaatcagcaactatttaaaaagcgtaaaagtgaatttatccttgatacaattaaatgaatgaaatatgaaataggagctactctctcactatgtaacagggatccagaatgcttccttgggaaaacactatgcatacataactgcatgatgaattctattccttggaactaatggtaaaaatagccaccatttgggagagtccttgtaccaggcactgcaataacttctatacatcctcatctttacttacttaccttcatttatttatgagttggggtctcactctactgaccaggctggagtacagtgacacaatcatagctcactgcaccctcaaactcctggcctcaagcaatcctcccaccttagcctcctaaagtgccacaattacgggtatgagccacctggccaagcctaaattttttgttttgttttgtttttggtagaaacagtgtctcactatgttgcccaggctggtctcaaactcctgacctcaagtgagcctcctgccctggcctcccaatgtgctggggttacaaggcataagccactgtgcccagtcttatcttcatcttttttttttttttttgagacgggtcttgctctatcactcacactggagtacactggtacaatcacagctcactacagccttgacctcctgggctgaggtgatcctcctgcctcagcctcccaagtagttgggactacaggcatgagccaccatgcctagctaattttttttttattctttgtagagatggggtctcactaagttacttaagcaatcctcctgtctcggactccagggtgctgagattacaggcgtgagccaccgtgcccagctaattttttaattttcagtacagatggggtctcgctacattgcccaagtgatcctcctgcctcagctccccctaagtgctgggattataagtgtgagccactgcacccagcactcatcctatcttaatgctcacaataactctaggcaagtaggtatcactagcctgtgtcacagatgaagaaactgagatgcagctggctgactcaaggataaataagagccattcattcattcattcatttagtagagatggtgtctcgctatgtggcccaggctggtctcatactcctggcctcaagtaatcctcccgcctcagcctctcacagcgctgggattacagcgtgagcaaccatgcccagcctaagagtcatattttatttcaacagaagaaaagtccacaagacagacagccacacaggcccctcaactaattccccaggtccagccagaactgtcttggctgcaggtgccctgggttctgcttgaaaaaggcctgtgagctctccgccagtcctcctagggagaagagactaacataaaaatggtcgcatataatccctgcctgggccccaggggtgcctctgcaataactcagctatttgaatcattaaattcacttattactggagcccagataatccttttatgagtctccaccacaatgagataatgcaattttgctgggacagagtcacaagaacacaaaactctttctagttcctgacatagttggttctatgtggcacattgcaaaagtaaagatgctctggatgaaagccatgtgagaaacaggatgcaatatggtcagactcaagctgggaaaaggcgctccttctgcttcagaaaagatgctggaggaacaccaatacttccaccccgcaagatgaggcaacaaggacaggcttccatggacgaactaaaaacagagctgggaggtaaggaccagagacagaagaaaacagcagtggtcgggcgtggtggctcacacctataatctgaacactttgggaggccaaggcagtggatcacctgaagtcaggagttcaagaccaccctggccaaaatggtgaaaccccgtctctgctaaaaatacaaaaattagctgggcgtggtgatgggcacctgtagtcccagctacttggaggctgaggcagaagaattgcttgaacctaagaagtggaggttgcagcgagccgagatggcgccactgcactccagcctgagtgacaggctgagatcccgtcacaaaaaaaaaaaaaagaaagaaaatgaaaaaaacggcagggaaggggatgaactagaggatgggaaagtagtaagactccaagcagaggccagaaaggggcagaacagcaagagacaggaaggtcactgagtgccacatcaaaacatgcaggtcacatgcaagaactgtgtaaacacaccacgcccttaacaagcactgctgtgcggacagggcctgctgttatccagccccaagtcatctgctttatcttggacctcagtcttcttggtcactaaagactgaatcctctgtccaggagtagggattcaaagagctctgtcctttcatccgtgctgtcacatgaaaaaaaaagaagaaaaaggacctctgtccgacactgttctcaacctttctgtcctagtgttaaaaatacgtaacatgcagggtgcagtggcttgggaggccgaggcgggcggatcacctgaggtcaggagtttgagaccagcctggccaacatggcaaaaccctgtctctactaaaaatacaaaaattagccgggcatggtggcaaacccctgtaatcccaggtactcaggaagctgaagcataagaatcacttcaacccaggaggcggaggttgcagtgagccaagatcatgacactgcactccagcctgggcaacagagggggactctgtctcaataaaaaataaaaaatgtaaattaaaatttaaaaaagggccaggcacagtggctagcacctgtaatcccagcactttggaaggccgaggcgggctgatcacttgagatggagttcaagaccagcctggccaacatggtgaaaccctgtctctactaaaaatacaaaaattagccaggcatgggcacctataatcccagccactagggaggctgaggcagaagaatcacttgaacctgggaagtggaggttgcagtgagccaagatcacaccattgcactccagtctgtgtaacggagtgagactccatttcaaaaaatgacaaaaaaaaatctgtaatatgccaggtgcagtggctcacacctgtaatctcagcactttgggaggctgaggctgacagatgattgagcccaggagttcaagaccagcctgagcaacaaagtgagaccctgtctctacaggaaaatcaaaaaattatctatgggtatggtggcacacacccagccaggggaggctgaggccagaggatcacttgagcccaagaggtcaaggctgcaatgagttatgactgcaccactgcactctagcctaggcgacagaggaagaccctgtctccaaaaaaaaaaagtaataatctcatatgatctggtgcttaatgccagagttgaattcttacataagggtaaatgcttaaaaaaacagttttataccctgtcaagtttacctgcaagaattagtttgctggctgggcacagtggctcacacctgtaatcccagcattttgggaggccaaagcgggtggatcactggaggtcaggagtttcagaccagcctggccaacatggtaaaaccccgtctctactaaaaatacaattagctggttgtggtggcccacacctataatcccagctacttgggaggctgaggcacgagaatctcttgaacctgggaggtggaggttgcagtgagccgagatcgggccactgcactccagcctgggcaacagagtgagacctatctcaaaaacaaaacaaacaaaagaattagtttgctattttaaaataacatgcaaagaaaatggactttttcttgtaaaactggaaagataagtgaatcttcttataaaacttcttttaaaaaattccatccctgcctgggctcaaatgatgggaaaatgtacagaaaatccagttgagttagctggagataccaaatacctctaaatgtgagttatctgcagttattctatgaacaggagagccatgtgaggcctcaaactagtatttcagggagcagcgtgcacactcgtggttttgtggtcttcaaccgtcctgctagcccagataagtctgggtggtcaagaaccgtctggtgacagcgtgcagcccagctcagcagaattcagcatgggggaattcagcctccttagagatgcactccctgctgaaatctcactgcgatggccgttcccgcccttccggggctctgaccaaacactctgaccaggaacgcttcccaacagataagcagtattctccatttggtctaatttatgattcagaaggaaaaggcgaaaaacgaaaactttctattcatctatttttcacaccaatggaagcaatgtggtgatgtatgtatgctgttacagtcacttgtgtcctcctgacctataacatttagagatcctgtccatattcttctcaaagcttctcattaaagcacccagccctgcgcctggttccctgcagagatggagtaactgctcacccacttgaacaaaacgatagtggggcattaagaggaagccccagctcccagggagaggtcatctctcacaagagctggaactccactgtccatatccagggtaggtgaggggctaaccccaggtcatagccaagcaagcacaaaggcaaaaagcccaaaacaatcaggatgctcagtgccagcccaacacagtgatagctggaatgggcagggctagagagaagccaggactggaaccagggcgggaccatgcagggagcgggaaagtttggaggagcacaacagcccctccgaatgccaccgcatcaccctgttcccggaccacagggagaagaaccaccatgcaccctccaccagtatcttgggcagatgggcaggagctctagggccgcttctcagtgttcctcagatggagaatcaacctcaggacaaatcaagtctggatccttctgggctgaatcctttctaggattggtacctatcatgacatggtcacattcctccactcctctatgagaggatggagtcattggacaccaacctaatgctggcaaatgacagacaggaagagccccagcagggcagatgccacagaaaccttaactgggacacagaaacatcactaacaaagacccagcagctgtcttggtgagggagacacagtctaacagtcacaaagaggcacaacggagaccctaacccccggccctctgcagacacctctgcctgccctcccagggaagctgccggccaagattatttcaggtcaccaggcaagactgggtgtaacttgggaatgtaagtctatccaatgtcagatccccaggtgcattcctgtccctatggctggtcagaagaagtctctgctcctgctcccatcctgcatcccctccttccaaggcctacgggctgtgcctcctggatctgccccctggatttcactcacgcctgtccaccagcaacacaacaaagcgatctttccagcgccgagctctgcaggattcctcaaaggattcccctgcactccccaccaggtgagccctcaacttctctgctaggtgctcaggacctggcacatctggcctctggccacctttgcagcttcctcaccctctgctgtctccaaagcttcccccgaagggaaagagtattttccctctttccacccattttgtcctgaaaactactatccccctgggaacgaccctatgtagcgtgtgggtggctgagaaccccccttccacacaatggtcaaggccaggagtacccaagccctggcagcaaacacccagcctactgctcacccagttaaaggacggacccctgggtgacagcaggccccggggctcagtacaccggacccttaggccacctcaacaccagtcctcatgccaggctgatctcgaaacgtaacagctactgctcagcaaaacgtggtggctagtgcctgtaatcccaacaccttgggaggccaagacgagagcatggcttgagtccaggagttcaagaccagcctaggcaacctgctagactccatctctacaaaaaaaaaaaaaaaaaattaaaaattagccgtgcatagtggcatgcgcctgtagtcccagctactacagaggctgaggtgaaaggattgcttgagtccaggagtttgaggctgcaatgagctatgatggcatcactgcactccagactagccaacagagccagaccctgtctcaaaaagaaaaaaacgaaaagaaagaaaagaaaaaaaatatccactgctctactcttcggccagtgggaagagtgcattttttaatcaaaataggggcctctatccatgaaacccatcaacttgtaaaatctgagctctctgcagcctcacagtccctccagcactgccagcagccctcgttccctgcatgctctaaatcctcagcgaagacccgtcccttgctccctcgcccagcacaggccgcgagtgcccacgtcccctgcacctcgtggggcagccaagggggcaccgcgtggctcgtgtgctcctgggcagtccattttcaaccacaagacggaacagactcagaatccggaacatctctcggtgcttaagagttttcctttaacaatctttacctgtgggaatgcagagacccccccgccctgcgagaggccggcagccagggattccccgctccgcgccctcatcaccccccggaaaccacaaccgctgcgcgcgcggctcggacccccacccgccgctcccctccagcagaccctaggcctccgggaaaccgcgcggcgaccgccccgcgccccgccagatccgaaccgccggacccggcaccccggccacacccgccggtgtcgacgcagcgaggctcggagggtgcattctccgcgccgaccgctcccctcctccagacccgaggggcggagtgggcagggcgcgccggctgcgcaccgggcacccacctggggacgcgggggctggggcggcgcggggccacctggcggacccgggagcggactccggagagcagggagcccctcccccctcactctccgggccccgcccggccgccgcgccccgaggcgcagccatcccgcgggaggggaggcgcaggaggaggccagcgcgaggacacttacttaaaaggctacatcgcttcattcccagcccatcctgggcgacggcggcacctccctcgtccgctgctgggacctcgatgcccaccaccctcgcgcggcgatctggccctatagcccaccccttactccgccgtggggcggagccgcgccacagctgacccaatgagaaaccgtcgtttcccagagtgacgtgtacgcagagcaatcatggagtccagcccagccgggggcggggctcaggcggctccctacgcttcctactccagctggccccgccccacgcccgcaactgcgcgtgcccagaacgtgaggggcggggctgggagccgggctgacactagaggtggggttagcgcttggaagcaccgaccaacgtgagcgcaacgcggcagggacacctgaccccggcggcgcccagcccctcggattgccagtcactgctcgctttggggcacggaggtgcccagtcctgcggggcacccgacgtcctgtcgccgacagggtccgggagtcagtatagctgggttctagtcccatcacaggcaaaaactccgcgggagcctggcccgctttttacctgggcctcagtttccccatccgtaaaatagaacgggttggatctcccgagcgctaacattccagaactcggatggggcgaaggggagggagggatgggccacccacacgtgacctccccgcgtggagccccgcctaccactgatccagggggtggcagctccggccgggacgagcggggtgggcgggtcctaggaaaccctacccggccgcccttggcagcgcctaaggcggagcgcgcggctctgcagcctgcttgccccggagttggcacccacggaggatggggaccgcaccctcagcttcgcagggagccaccgtggaggccagggcggtgcagagacacgacgtgtgactcggagtgcgcctggggaggatggacgagggagcgggggaccgctaacggggctccctctgcgcgccccgtccgcagaggcgcacgtcgagggtcccgggcgggctccgtggacgttggcggtagcgccgagcgagtcacggaccatgaagagcgttcgtgccgcgcggcccaaggccgggatgggggttagccacatcctgccgcgctgagggggaggctaacgggcgcgggcggccgggcccagccggagcccaccgcgatggcgagggaggagtgcaaggcgctgctggacgggctcaacaagacgactgcgtgctaccaccacctggtgctgaccgtcggtggctcggcggactcgcagaacctgcggcaggagctgcaaaagacgcgccagaaggcgcaggagctggcggtgtccacctgcgcccggctgactgctgtgctgcgcgaccggggcctggccgccgacgagcgcgccgagttcgagcggctctgggtggccttctcgggctgcctggacctgctggaagcggacatgcgacgcgcgctggagctgggcgccgcgttcccgctgcacgcgccgcggcggccgctggtgcgcacaggtgtggctggcgcctcctccggcgtggcggcgcgcgcgctgagcacccgcagcctgcggctcgaggcggagggcgacttcgacgtcgcggacctgcgggagctggagcgcgaggtccttcaggtgggcgagatgatcgacaacatggagatgaaggtcaacgtgccccgctggaccgtgcaagcccggcaggcggcgggcgccgagctcctgtccacggtcagcgccggcccctcctcggtcgtgtccttgcaggagcgcggggggggttgcgaccccaggaaggccctggccgccatccttttcggcgccgtgctgctggcggctgtggccctagccgtgtgcgtggcgaagctgagctgacggacacccgacggccgcctgctgctgccgctccctcccctgagaaaagactcgggatgggtgtggggtctggcctgtgcaaggggagtggtcctaaaaccccgtgtgtgcatgggtacacgcgcgtttccagtgcacatctgcctgggcaggacacggtttcctcttgctggcccgggaggagttaactttgcgccggccgtcagggcattaccgctaacgtctgcaggagctttattccctattaatagaaaaccgtcacagtgaccctagatccctccgagttaatgagttaacacatgtgctgttggggcgtctttacagggagtccgagttcggtgcccacccctgccagcgtcgccccctttctgcgtgggacagtttgaaaaggtgggtggggtggagtgaagtttggagagggacgctgtttggttctatgtggttggtctgtttcccggacaagaaaaattgcaatcaaatgtcagcagcttttattaccttaatctttcagggcctaaatttaggagagtgtcccgagagcagttcatacaaagggctttctctaagacgcgctacagcccttcctagcagagtttatccattcgtccccaagagcagctagaagagatttgaggtcatgacctcccactgccgctcaggggctgaccctatttaggaaaccaaagagggtgggttgaacctactctcacggacttggatccagtgcgcacacttgcctgcggaaaagggctctccccagccacccggagatgggggtaagaggaagagcagaggcttggggtagggccacctggtgtttaaacaggcactttctccttctctggggcttatttttgttcagaactagaccagagtgtttgaacctcctttgcaggagggctgggaatcctctttagagcacttaatcctatttatcccctggaatgtgcgtgctggccagtaggagggctggctttggcagctccctgacccccgcgctgcccgcccctccggggtaatgtggcattactggcccacagaggttttgagccaatcagctctgagactgggttagaatgtaacagctttaacttgggatttaagaagcttttaaaaggtaataatactctgaaagaaaaatgacgtaaccacagcgtgtactatgaaagctgttattttaataaagaacgctgggccatgaactcatacctgccaatgagtcaaacatagtatctttatgtagatacttagattactaaatatatatttcatctacttctgaagttgatagtcttcccccccccccacttttttcttttttgagacagggtctccctctgtcacccaggctggagtgcaatggtgtgattgtggctcactgcagcctccaaatctcgggctcaaactatcctcctacttcagcctcctgagtagctggaactacaggtgtgtgccaccgcacctggctaatgtttttaaggcagttaatttatttatttatttttatttttctttagagataggatcttgtggtgtcgcccaggctggagtgcaggggcgcaatcagcaaaccacagccttgaactcctgggctcaagctctcctcccacctcaccctcccaagtagctgggactaaaggtgtgcatcacggcactcaactaattttttgtagagacagagttgggctatgttgcccaggctggtctcaaactcctggcctcaagtggtcctcccacctaggcctcccaaagtactgggactacaggcataagctactatgctcagtctaaaatcaatattctttatttttttctataatttcactgcaaaataaaatctatattcttgagtagccacacaagtgtaaatgacagaatgttaagtggcctttaattcttttgatcaacaagtaagaaaatgcttggtccttggtcccaggatgacatctgcctgagcagtgctgccaaatcctgcctgtggtccagagagagctctgtcccattcttgggtaagttaggctgtaaaaacagatgcatttaactttcttttctttttcttttttttttttttttttgagatggaattttactcttgttgcccggactggagtgcagtggcgtgatctgggctcactgcaacctctgcctcctgggttcaagcagttctcctgcctcagcctcccgagtagctgggattacaggcgattgccaccatgcccggctaatttttgtatttttggtagagatggggtttcactatgttggccaggctggtcttgaactcctgaactcaggtgatctgcccacgtcagcctcccaaagtgctgggattacaggcgtgagccacctcgccaggccacatttaactttctaaaggtaatttgcaataaattccagagactttggctgaaaactgacaaggattttttttttaattcttttttaccccagaagtgagaacaggggtgaccaggggaaaggaattggccatttttcacatgggccgcttggaggaccaaggggcagaggtggatagcagaagggatgctgtcaggacacccagacttaagattcactctccccccaaccccccactattcctcaggaggaccaagagattccagcagctcagatagggcaaatgtaggatctgtgtttgtgtctgtgatcatgcttttaaaagacccacaaggtcttaagctgattaaatgttttgcaattactttttttttttttttttttttttaagatactgggtctctatgttaccggggctagagtacagtgtcacaatcatagctcactgaagcctcaaactcttgcgcttgagagatcctcctgtctcagcctcctgtctgggactacaggcgtgcaccatcacaccctgcaaatttttaaaatatttttattttttagttcttgtacaaatggagccttcactatgttgcccaggctggtctcaaacacctgggctcaagcagtcctcccacttcagcctcccaaaaccctgagatttataggcgtgaaccaccatgcttagctgacaattactaataacaagaacctcttgcttcacccagtgtgggtgaatctgaataggggccacttcaaattcttttgcacctggttgcccagagtgcctttgaaaatgacatagaacgtttttaagccactcctcccacatatggactctctcgttaccttccccagagtctcatctctggcaagagaaggctgggacatttcattaccctgtgttggaaaatatacctaggccagcacagtggctcaagcctgtaatcccagcactttgggaagctgaggcaggtggatcacctgaggccaggagttcgagaccagcctggccaacatagcgaaacccgatctctactaaaaaatataaaaattagccgggcatggtggcacatgcctatagtcccagctactcaggaggttaaggcaagagagtcgcttgaatgcaggaggtggaggttgcaatgagcaagattgtgccactgcactccagcctgggcaacagagcaagactctgtctcaaaaaaaaaaaagaaagaaaagaaaatgtatctaaaaatgaagtcctaaaggtattctactgtttctaagactgggaacctttgttcttatcaaggtgtttcgggttatgaatttttttttttaaaatggtttagcagaacctattgttgaaacaacccatcagatgtgtgtttcactgagggcagtgggaaaaacaaggtttttctttttgagacagggtctcaatctgtcacccaggctggagtgcagtggtgcaattgtagctcattgcaacttcaaactcctgggcccaagcgatcctccttcctcagcctcctgaattgctgggactacaagcttgcaccaccatgcccggcaggataaacaagtttttgttgttgtcactctttctacccacttggctgatctttgggtatttagttatatgtggatcagatgtgtacttgattctgaaggtcttctgctcgctgaaattagtgataaaatattgcaaaaaaaaaaaaagctgaattacaataaatatactcaccctgttggacctattaacataaacagctctttgagtttgaaaattttaagtattaggggtatttggtattatttggagttatgacattgcctaatagaacttctgctatacgacaagcaaaatcactttctgccttgtgcaataggctgctctctaactagtatctctgctctcatttttatatgtaatgcaagagattgctttctaatagaagcctgattaaattgagatgtttgatgcataagtcattaattttctgtgaacatttagtatgaccttaaactatgatacaagtgtaggaaaaaaaaacaaaaaattcaaactgtgttagctgacactgaaaagacaaaaacttggaatgtcaaggcttttatcatggaaactttgatttcagaagaatgtgatctgggcttttgttattagtaaaaataatatttgtaggagaaaaaaatgcctggcaaattatttttatgtattctaagaacatatgctttttttcttttcttttcttttttttttttttttttttttttttttttgagacaaggtctggctctgtcacccacgctggagtgcagtggcacaactttggatcactgcagcctccacttcctgggcttaagtgatcctcctgcctcagcctcccaagtagctgggattacaggcgcccagctaatttttttttttttttttgtagagatggggtttcaccatgttgcccaggcttgtcttgaacatctgagctcaagcaatccactagcctcggcctcccaaagtgctgggataaccagcatgagccaccacgcctagctgcttttttttttttttttttttttttttgagacggagtctcgctctgtcacccaggctggagtacagtggcaagatcatgactcggtgcagccttgaattcctgggctccagtgattcttccactttagtctctcgagtagctggcactacaggtgcatgccaccacacccagctaatttattttaaaaattttgtgtagatatggggtttccctatgttgcccaggctatcttgaactcctgggttcaagtgatcctcccagctctgtctcccaaagttctgggattacaggcatgagctattgtgcacaagctaagaatatgtgcttttaaatcccataaggaaaaaaatatttttggtaaataaaattaaagcataaatatcatgatttacctgacgtttaccgtaagcaacataaaagatatgtgatactgaatgactaaaaagtagttttggttaaagagagttctagtttccatgaggactctgacaatgctgcattttattttgctttttaatgtgcacattggtacatgtttaactactctactcctgttcaaaatgtacttctctgttctgcaatgaatgctttttaagggtgcgagccccagggcgtgaaatgaatgtggtagaactggcctctacatttcttttgggtgtgtctcctcctgcaaggcctggccagctgcgatgggcagaggacactgcctcgctctccaagtacctcaataagtcattgacctacttgtgcctcatgtctctcatttgcaaaatgagggtcctacctgattaactcaaagattccccttctagagcttaaaacattgaacaaaatgcagttaaacaagaaagggctatgtttgttggttttgtttttgtcttttttggtgtagttggttggttttgtgtataatggaatggaatcatatcatttgctggttattgtctaatattagtttcaaaaactaataaaaatactttaaacttcaaattaattttcaaaatcagaagtaactaagcatatcatgctttcagtgcacatcagaattagtgtatgggcttaaaagcaaatgtgtgtaaatgctacttattggtagtatttaaattagattaggaatttaaattcaggctctaagtcggagtctaagaaagcccactgattattaaaacagtctgttttacccagcaatccaggccacctgaacatcagagcctgggaaacagtagataggaagctctgtcatttgtcttggaggctgggagaatcctatcccataagtaacttggtagccttagaactgcatgagctgctttaccactgggaaacacgagcacagcctagcttgattttgtatgtggtatcagatctaaggtggatggaattcaggacttcctgtctactctttgattttgttttatttttagaaatgttttattttgttttattcatttattcatcttcagagacatggtctggctctgttgcccaggatggagtgcatggtgtgatcataggccactgcagtgttgagctcccaggctcaagcgatcctcctgcctcagcctccttagtagctgggactataggcacatgccctaccatgcctggctttgtctactttttgaatgatgtctcaaactagaaggtctattaatttaaaaaattaaggatagcatgccataattaaaaataataacagtgggaaaaggcaccttccaatgattcagacatcaacttgtgatttaaaaaaacgaaaaataaataataggaaaaaaaggggaaaaagttaaataaaaataaaattaaaaaaaaaaaaagaaacagggccttgctatgtagcccaagctggtctcaaactcctggcctcacgtgatcctccaccaaagtgctgggattacaggtaggagccactgtgcccagcctcaacttgtgattttttttttttgagacagagtctcacactgtcacccgggctggagtgcagtggtgaaatcatggctcactgcaacctccacctcctgggttcaaggatgagccaccacacctggcctcttcttttttcctttgagatggagtttcattcttgtttcccaggctggagtgcaatggcatgatctcggctcactgcaatctctgcctcctgagttcaagcaattctcctgcctcaacttcccaagtagctgggattacaggcatctgccaccacacccagctaattttttgtgtttttagtagagatggagtttcaccatgttggccaggctggtctcaagctcctgaactcaggtgatccacccgcctcagcctcccagagtgttgggattacaggcataagccactgcacctggccttttaaaaatatatatattcttaatttttgatatttgagtgggagtgaacatcctgatcaatgtatttacccttcacagatttcattacataagaagatgttcaggattataaatctccaagtgcttttctgcaatgtgatttttttttctgagacagtctcactcccgttgcccacactgaaatgcggtggcacgatcacgccttactacagcctctacttcctgggcttaggtgatcctcctacttcaacctcctgagtagctgggactacacatgtggtgccaccatgcccggctaatttttatatttctagtagagacagggtctcactatgttgcccaggctgttctcaaactcctgggctcaagcaatctgcctgcctgcttcagcctcccaaagtgctgggatgacaggtgtgagccaccctgcccagcccagcccacaatatgattatactcagattttaatgcaggatgcaatccaagaagataggtctccatatgaaagatctttggctatggtcaacacagatcaaagtcatatttcaaatattgttttttctggctgttaggaactgactgaaggtcatgttgcagtcttctctccatgaggacaagatgaataatatctggaaagatgtttttctcacttatttttcatctaattccatagaagagattctggatgtttttatcgcagtaccatgagatcttgggcatacttgttctttggtgtttgagaattttttttttttttttttttttgagacagagccttgctctgtcaacccaggctggagtgcagtggtgcgatctcagctcactacagcctccacctcccgggttcaacattcccatgcctcagcctccagactacctgggattacaggtgcatgccaccatgcccggataatttttgtatttgctagagatggggtttcaccatgttggccaggctggtctcaaactcctgatctcaagtgatctgcctgctttggccccccaaagtgctgggagtacagatgtgaaccaccgcactggctcgagaattttaaaactttaaggcttattaagaccaatgtaaataagccaaataagagctcctgttgtcaaaaggatttaaagagtacttctggccaggtgcagtggctcacgcctgtaattcccagcactttgggaggctgaggtgggcagatcacttgaggtcagcagttcgagaccagcctggccaacatggtgaaaccccatctctactaaaaatacaaaaattagccgggcgtggtggcatgcatctataatcccagctacttgggaggctgaggcagaagaatcacttgaagccaggcaacagaggttacagtgagccgagatcacaccactgtgctccagcctggacgacagagtgagactctgtttcaaaaatacatatatttaggctgggcgcggtggctcacgcctgtaatcccagcactttgggaggccgaggcgggtggatcatgaggtcaggagatcgagaccatcctggctaacaaggtgaaaccccgtctctactaaaaatacaaaaaattagccgggcgcggtggcgggcgcctgtagtcccagctactcgggaggctgaggcaggagaatggcgtgaacccgggaggcggagcttgcagtgagccgagattgcgccactgcagtccgcagtccggcctgggcgacagagcgagactccgtctcaaaaaaaaaaaaaaaatacatatatttaaagagtacttttaatatgctagtaccagaaagcaaagttgagtgtcccctgcttgtatgtacgtattaggcatatggaaagatctacagggaagtaaagaaataaaaatattattaatatatattaatattaacaaagtggtaggattatgaatggtgtttttcagtatttttccggaatgagattatattgttcttacgataaaattttgaataattttgtcatctagaaaatattattctgttgtttaaattggaatcccagctacctgggaggctgaggcaggagaatcacttgaacctgggaggcacagcttgcagtgagttgagatcatgccactgcactccagcctgggcgacagagcaaaactccatctcaaaaacaaacaaaacaaaagtaaatacaggccagttgtggtggctcacgcctataatcccagcactttgggaggctgaggcaggtggatcacctgaggtcaggagtttgagatcagcctggccaacacagtgaaaccctgtctccactaaaaatacaaaaattagcctggtgtggtggtgcacgcctgtagtcccacctactagggaggctgaggcacaagaatcacttgaaccagggaggcagaggttgcagtgagctgagattgcaccactgcactccagcctgagcgacagagtgagactctgtctaaaaaaaaaaaaagtaaacacagttaaattcactctaaacatgtgcaataatgtaccaataatgtaaacactactacagccaagaagatatagaacatttccatcacccctaaaaagctcccccatgtcactttgtagttctcatccaaaacaccatgggatatcagtttgtaaaggtctctctcttcaaagagggaaagggcaggttgggttttatgcatcccagggtctgtattacacaagaaagtcatattcagcaggttttgggggaaagctgtacatatttatgagggggttgaccacatgtgcaatgggtaaacatacaggtaacatacatcacccatgtttattttggagcaagtttgtgtcaggcgtttgaaccagagcaactccatcttgtataggggctggacaaaatgaggctgagactggtacaggagttaagaagaatttacttaggcagatagtgaaggcatggaagtcctccgtaaagttttcctttctaacgaagagcagcctgtaaaatccagctgcagacatagatccgacagttgtgccactcctgttgaagatggcggctccatcttcccttctctttgtcggccacatgtactgtaagaagcagacaagatgacaccaatcaactggaaagcccatttgcatgataagattagggtggggtgaccagccttccccaagatcatgccactgcactccagcctggggtgacagaatgagtgagaccctgtctcaaaaaaaaaaaaaaaaaaaaatgccaggcacagtggctcaggcctgtaatcccagcactttgggaggccaaggcgggtggatcacatgaggtcaggagttcaagaccagcctggccaagatggtgcaaccctgtctctactagaaatataaaaattagccagatgcggtggcaggcacctgtaatcccagctacttgggaggctgaggcaggagaatggcttgaacccaggaggcggaggttgcagtgagccgagatcatgccactgcactctagcctgggcaacaggagcaagactcctcataaaaataaaggctcatgttgctgcgttagctcatgtctgtaattccagcactttgcaaggccgaggcaagtggattggttgagcccaggagttcaacaccagcctgggcaacaaagcaaaaccttatctctacaaaacatacaaaaattagcccgttgtggtgctgtagtcccagctactcaggaggctgaggtgggaggaccacttgagcctgggggtgtccaggctctggtcagctgtgatagcatcactgcacctgggccgcagagtgagaccctgtctcaaaaaaaaaaaaaatgaataaccacctaaaaataatttctcagaatgatttttaaaaaggttttttttcttttttcttttcttttctttttttttttttttgagatggagtctaagtctgtcgcccaggatggagtgcagtggtatgatcttggctcactgcaacctctgccacctgggttcaagcaattcttctgcgccaccatacccagctaatttttgtatttttagtagagacggggtttcaccctgttgaccaggctgggctcaactcctgacctcaggtgatccacacatcttggcctcccaaagtattgggattgccaggtatgagccactgtgcccagcctgaagtgtaacttttgaggctaagtcataaaaggcatcatggcttcttcctctctcatggatcattctttctgggagaagtttacccaccaagtcctgaagacattgaagcaaccctatggaaagatccatgcggtaaggaactaggccccctgccaacagccatgtgagtgagccattgaggaagtggatctcccagtgctggacaagccctggctgacatgctgatcacagcctcatgggagatactgagttaggatcaccacatggaggtggtccctaatccctgatcaacagaaaaggtgggataatcaatgtccattgttttttgtttgtttttcttgttttttttgttttgttttgcttttgattttgaaacagagtcttgctctctcacctaggctgcagtgcagtagcactatctcagctcactgcaacctctgcctcccgggttcaagcgattctcctgcctcagcctcccgagtagctgggattacaggtgcccacgaccacacccagctaatttttatttttattttttgtatttttagtagagacggggtctcaccatgttggccaggctggcctcaaacttgtgacctcaggtgatccacccacctcggcctcccaaagtgctgggattacaggtgtgagccactgtgccccatctttttttttcttttgaggcagagtcttgctctgtcacccaggtcggagtgcagtggcgtgatcatggctcactgcagcctccaactcctgggcccaagcgatcctcccatctcagcctcttgagtagctgggactacaggcatgtgataccacacccagctaattttctttttcttttttttttttttgagacggagtctcactctgtcacccaggctggagtgcagtggcgcaatctcagctcactgcaagctctgcctcccgggttcttgccattctcctgcctcagcctcctgagtagctgggactacaggcgcctgccaccacacccggctaattttttgtatttttagtagagatggggtttcaccgtgttagccaggatggtctcgatctcctgacctgtgatccgcccaccttggcctcccaaagtgctgtgattataggcgtgagccactgcacctccccactaattttcttttaagaggaggggtctcactgtgtttcccaggctggtcttgaattcctggcctcaagttatcctcccgcctcgccctccctaagtgttagggttacagacattacccaccatgcctggacaataagtgtttattgatttaatccaccaagtttttgactaatttgttaacagcattaggtaaataacatatccacaaattatcctgtgagcagagcactttagatatgaatatgatatctgtatctctttgaatgctcatggatagttctttgcttctgtatcatttcttggctacagttcagataactgagtttatatgacatgatctctgaatccataaactgtaattgtgtcatctcagtgccccaaatatgacagtcatggcagtgtgcacattttggacactgttctgtgttggttaaggtccagtttctgccaggtgtggtggctcacacctgtaatcccagcactttgggaggctgaggtaggcagatcacttgaggtcaggcgttagagaccagcctcaccaacatgatgaaaccttgtctctgctaaaaatacaaaaattagtcaggcgtagtagcatgcgcctgcaatcccagctactccagaggctgaggcaggagaattgcttgaacccgagaggcagatattgcagtaagccgagatcgcaccactgcactccagcctggtgagagcgccagactccctctcaaaaaaaaaaaaggttcagtttctgttgttttgctatgcacccaggaccaggacttggtcatctcactcatgagtaaccagcttctgtgaaaaccagctgatgttgaaacacacacattcacctacaaaaccacggtgttattttacagcaaagggagtagtatgttcttaagacccttaatccctccataaatggttagtcatctgtaaaatagtggtaactgtttccacttcatggggttttgtaagaattacacaactaatactaataaagttcctagtgcctcacacactgtacccagtaactactaatattattatcccctaggattattattactcctagtattgaagacatgttactttaatcacctgagtgcctttctctccattgctctgtatttttattttatttatttatttatttttttgagacagagtctcgctctgtcacccatgccggaatgcagtggcaggatcttggctcacagcaacctccacccagattcaagtgattctcctgcctcagcctcctgagtagctgcaactataggcgcgggccgccacacccagctaatttttgtatttttagtagaggcggggttttgccatgttggccatgctggtcttgaagtcctggcctcaggtgatccgaccacctcggcctcccaaagtgctgggattacaggtgtaagccacagcgcctggccagagaccaggtctcttcaaacaaaaaaacaaacaaaacccctaaatattgacaatgtcatctgtggattctacccaggaaataacccacattaaaatgatggtttgtgagggtcggcaggggtatagtgtatttcatccaaaaacataacaaatgtgtgatccaattataatagcaattatgggaaaagctgtcggtgactgataaggagttataaaagaaaagactcaaatttacacaggcttttcaaaagatcataatcctgctattggaggtggaagtcttctagacactaacaaggtggagagaaatctccatgtggaggcccagattaaacatctcccatcaaagtggaactcgtcaaatgtcctaagacacctaaggccgtccccaggcgccctgacaataaaaggtaaccagaacacgagagaaattactctgggagtacctttcacattcaaggtgtgcagtaggaaatttataaattggcatctggctcgtccattcatttctcattggtgtggttcacgtgtgcttgcaaaggtcagacttctgcccttcgaatgtcctctctccctctcccacagaaaacacccacatgtgggtccttgtttaaagcagaaagtcctagtccttagcttttagtgaggtggatgtcatcaggcctgggttggcatcctgttttttaccatggcaagtcatatgcgcccttaagcattcctgcttttggtccaagcttcctgcgtgggaatactgcggtcctcctttcaggcagctgtgaatgacaaacggtcgctggctgccgtgacacccattgtcccgcgagagtgccctagctgggccccagtgcactcgaggcggtccctgctcgggtgcccctcccacaggcaggcgccgttgccgaccaaacgcccaggttcacccaacgccagaggctcgtcctcaattcccgcgaggcccccggaggtgctggggtccctgcagggccgggccacctgccgtggagctcaggccgcgccagaatcggatccgggaagctgcgcgccatgagcagctccctgcggccgggccccagccgctggcggcgggcggccagcatcgtcctggcggctggctggtcgcgcccggagaccgccaccccgccgtcgcgcccgccgccggccgagggcttccggctgctgctgctgcagcgctccccgcaccaaggcttcatgccgggcgcgcacgtcttctccggcggagtgctggatgcggccgaccgctcggcggactggctgggcctcttcgcgccgcaccacgggccgccgcgcttcggcctgggcccggcgccattcagccgcaccgctttcccgtcgctgcccgacaccgatgaccacaagaccgacaacactgggacgctgcctgaggacgtagccttccgcatctgcgccgtgcgggaggcctttgaggaggcgggcgtgctgctgctgcggcccaggacttccccaccaggcccagcacccgggcctggcctcgccctggagccaccgccgggcctggcctcctggcgcgaccgcgtgcgccaggacccgcgccacttcctgcggctgtgcgcccacctcgactgcacacccgacatctgggcgctgcacaactggagcgcctggctcacccctttcttgcggggcaccactcgccgctttgacacggccttcttcctgtgctgcctgcgcgagccgccgcccgtctaccccgacttggcggaggtggtgggctaccaggtaaggcctgctcagggccttgctgcggaccgccaggacgtgagagggaggacccctcccagcggcccaggcccccaagggacccccgcataggccaagcccagagagattaagcagcaaggaacgcttagacgggctggaaactctcacccctgtagaccaaagccatgctcttggtgaagtgctctctgctttcctaggctttggggtctcaaggcctggagcctgtctctccacgtggttcctccagcgtggccactgtgtaagcacttgtacatgtgtagacatagtacatctccacagccgtttaatttggttttcttggagaacagacttaatatgatccagtcttcctatttttatttatttttggtacagatgggggtcttgtctctctgtgttgcacacccaggctcgtctccagctcctggtgtgtccagaattggttccttccagtgggttcttggtctcgctgactttaagaataaagccgcggaccctcgaagtgagtgttacagttcttaaagatggtgtgtccagtttcttccttcagatgttcagatgtgtctggagtttcttccttctggtaggttcgtggtctcgctgacttcaggattgaagccgcagaccttcgcagtgagtgttacagctcttaaaggtggtgcgtcaggagttgtttgttcctcttggtgggtttgtggtctcgctggcttcaggagcgaagctgcagacatttgtggtcagtgttacagcttataaaggtagtgcggacccaaggagtgagcagcagcaagatttattgcaaagagcaaaagaacaaacctcccacagcggaaggggatcagagcaggttgggtgctggtggctgggtggccagcttttattcccttatttggccctgcccatgtcctgctgattggtccattttgcagagtgctgattggtccatttttacagagtgcggattggtgcgtttacaaatctttagctagacagagcactgattggtgcgtttttacatagtactgattggtgcatttacaaacctttagctagacacagagcactgattggtgcgtttttacagagtgctgattggtgcatttacaaatctttagctagacagaaaagttctccaagtccccactggacccaggaagtccaggggcttcacctctcaatcccgcctctaaacagggcaccccatctgctgttgggaattgggcaatgactgctctagctacttcctgctggacaggggcaaagaaggggccctgcagttgtagtgtcctccagaggggaactctctaggccagtgaaagggccagtgggtcggtccaggggtcctcggtagaagttgttagttgagctcatttgggtttccgtttgtaagaccatctgtagtttgatggccttgattctagaggaaacaaatttgacaaggaggttaaaaatacagggcccgaaggcgagtaatagtaaaacggctgtcacaggatgtagaaaggggagaagccatgttgcccaactccagaggttggtataagagtttgaaaggcgttgtctgatttcagaaaccttttcctgtaaatgccgggcggcatcttgcactatccctgacttgttagtgtaaaaacaacactcttcccctaaggtgcaaagtcctcctttctcagcagtgaggaggtctaggcctcgggggttttggagagtcactgctgccagagtctatttgggattgtagttactatccttactgaatagattttgttatttcttgcaaactgtctgagaaatactttgagagtgtgtggtagtaagataatgaagtagataaactggctattccggttcctgtagcagtggccatttctagccctataagtaggggtatcagttgtatggccctgtgctgatggacttgagctttgaggggcactgatagggtctgatgtccataagattagaagttaggataatatgtgttacactgttaacttttagcaaactttacttttgttgaaaaccttaagtttgggatttcaattattctttgctattaataagacctcgttcagtccatattcacttaaaattggtatagatggctccttcctgattctgtaagtactttaaggtttggctgagtgcaaacagcttgcacatttgagcagaccaattattaggcaattttcctaactctgcttctgtaagagtttccttatcacgtactgagtacccattgtgtctttttccttaatcgcccaggaggaaacatctatcatcctgtcctgaagggggttcctcctatgtctggtcagaccttcagatttagatcccctgttaggaacctgctgggttaaggatttttgataggaaggctacaggttgtcagtggcctcagtgcttttgggctatgcccttgtttacactgacaacaaggtggtattggagtgttacagggttacagagaagaccttcaattatcaattgtaggttttatttttcatttttatttttttggagatggagtcttgccctgtcacccaggctggagtgcagtggcatgatctaggctcaccgcaacctctgcttcccgggttcaagcaattctcctgcctcagcctctggagtagctggaattacaggcgcccgccaccacacctggctaatttttgtatttttagtagagacggggtttcaccatgttggccaagttggtctcaaactcctgacctcatgatctgcccgccttggcctcccaaagtgctgggattacaggcatgaattatatattttaaatttaccctggcttttaaaggaatagggtgcactgttttttctttactacttctatctctttctctctgactcctttgtctcttcctctctttccttctgtctttgactttgcctctttctctctgctggtctttccctgcctctgccagccgcttatgctgccgttctcccttctccttcccctttttgatggcttcggcagtgtaagactgccacctccttgggtttttgcattgagtgcaataactccatgatttccttgtggtatttaatgggggttcccccagaggttaggaacgctctttctttacatattgcagcatgggcatgtaggattagataagcatacttgctatctgtatacacgttttttcttttttcctttcccagttctaaggctcgggtaagtgccactagttctgctaactgggtgctggtccctgggggaagaggtttactttcaagtacggttacatcactaactgtggcataacctgcccttcgtatcccattttccacaaatgaacttccatcggtatataggttaaggtcaggattagctaacgggacttctaagagatcctttcaggcggcataagtctggactactacctgttggcagccatgcttgacccgctccctatcctctgggagaaaagtggcagggctgagggccacacatgtatgcacttgaagcactggtcactcaaggagtagtgcctggtatctaagcaggtggttttctgatagccataaacttcctttggcacctagtttgccatttacatcatgagtagtccagacagtgagatcctttccttgtattattttgatagcctctgacactaagacagccactgccacaactacccctaaacagttagtctagccttttgctactgtatcagtttccttaggtatgccactggttgtggagttgtcccatgagtctgagtaaggaccccaagagctattcctgctctctctgtgacgtttaaagaaaagtttcgtcctgtgggaaggcttaaggctagagcttgagtttgttccttccaatgcccagacttcagggttgattccctccccaagcaggggacaacaaatgggtaacttgttccccatattcatgtagataatagctccagctttggctaatatatccctccctaataagggtgtgggactttcaggcataacaagaaaggcatgtgaaaggagcaaagtctcccaattacaactgaggaggtgggagaaatacctggttacagcctgtcccaggattcctcggatggtaacagaccttgaggacagctccaagacaggaaattaacactgagaaagccacgccagtgtccaggaggaagtcaatttcctggccctcaatggttatacatacccaggactcagtgagagtgatgacatgagctggtgctttccctgggcaccctcagtcttgttgcatcatctggttggtggcttctgtcccagagaacctttgtcctctggggcagtgtgtcttccagtgattgcctcggcatagtggacatgggcgagggggcagcttgtttctcataggacaatcttttttttaaaaagtgtccttgtaaaccacactgataacaagccctaccaggtgattggcctgctccattctctgtcccctctgaaccaccaaggtttgtttgtctgagggccatgactaagtctgcggcctttctattatctcacttttacttttgggcctgtccatcttggtccctattatagaacactgaggttgccaggtttaataatgcttccagagtttgttcagggcccagggctcgcttttggagctttctcctgatatccacagatgattgggtaataaacttgtcttttaggatcaattgaccctcaagtgagtcgggtgacaggggagtgtattttcttaaggcctcccgtagctgctcgtggaaggcagaagcattttcttcctttccctgagttatggtggacatcattgaataattcatgggctttttcctaatactccttagtccttctagaacacaagtcagcagatgtttacgactccagtccccatgatctgagtcgaggtcccagtggggatccatactgacttactgacatacggcttgctgactagtaaggaatttgtccctttcttcaactgtcattctatcatttactggactaagataccaggtatctccaaactcttgggctgcagctaaagccacattcttttcattaaaggccagggtttgatctaacactagcatgacatctctccaagtgagatagaaggtttgccctcgaccctgtaggacatctgtatacctatcaagatcatctgaaagcttcccaaggtctgccttgatctgcttaaaatcagagagggagaagggaacatgtacctaggttgggccaaattccgctccccctacagcttgaaggggacataaccgatagcccgggaagggggcgtttgtgatcctttggagatttctttgcttatttccttctgggcagcggacattagaggaggattatcattaataggaaggggagctatagggaggctaggatatggaggtaagctgagaggtcctcctgtgggatgtaaattgcaagctttgcatacttgggtattctccttcaatgaaaagaaaacttagacataaggtatttcactccatttgccttccctcttacagaaaaggtcaggctgcaggatagtactgtagtttatacttccctcaggtggccatttttccccatcagagagagaaattggggccaggctgtagtatagaaaaaaatgagccacctctttttcagggtttgtgggtcaaattggtcccagtggcttaggatgcatttcaagggtgagcctgttgatgcctgagtgtttcccatctgaaagacaaaaccgcctgtggttttggtttgtttgtttctccccctgcccaagaacctgcaacggtccctggaccctgctgatcggaatagttgtgctcaccaatgcagcagcagaaacacctcttgcccaagaacctgcaacagtccccggaccctgctgattggagtagttgtgctcaccaacgcagcagcagaaacaacccctgcccaagaacccgcaacagtccctggaccctgctgatcagaatggttgtgctcactgacacagcagcagaaacactagttctcctagaccacaaggaggaatgaggaaggtcagatttcgtggcccttaccaacacattctcgaaaacctgcgccctttcctgtcctcctagacctcaaagaggactgagaaaaatcagatttagtggcccttactgatgcattcttggaaaactgttggagtcctaagcattctcctgttagtattgggaccttacccatgtcctataaagatgttatgcccccaaaatgaagtggagggccataccctgagggagggaagggatctccagagttggaagagtgaagccttttatccccagttatatgaataggaaggatacaatttctgaggctcccgatatcctagtttcaggaatagcttttgttaggcctgcttttctgaggagggattctaaaattccagataatcccccctacgatggggctttgagcaaaaactgtgtctttctgattggtgagcccgggtgtctaaagaaggtaacagagtcctgaagtttatcctagaaatcattcttacaggagaaactagaaaagcaccagagatggagtggtttttagaagtgggactagcctcaaagaaaggcgagaggaagtttgtctgacaggcattaggacccaggaggcaagggtcaggatagataggatagatgggtgagtctcgcctgtgcgacgtgactttcagagttccattcatggctgcagggtcaaccaacttgttgtcgggaccccggagctgaatggctttcctcgctgtcgaccctcggctcagcccagaagtacaggaaaagcagaagctggttccaggcaaaccaacgctccccactccgaagagtcgggggttgttagccctttcccagaaagcctgacacccgtgtctttagttcagcagccacactagtcgcttttaactggccaacatgtccccatatttagctctcaaattctaaggaaaaataggacagaatagcaagcgaaaggggtccaaaggcactcaccgcttagtgataggtaatagtcccttcgtggtcaccaaaatgtgtccagaattggttccttctggtgggttcttggtttcgctgacttcaagaatgaagctgcagacccttgcggtgagtgttacagttcttaaagatggtgtgtctggagtttgttccttcagatattcagatgtgtccggagtttctttcgttgggttcgtggtctcactgactttaggagtgaagccacagacctttgcagtgagtgttacagctcttaaaggtggcatgtctggagttgtttgttcctcctggtgcgttcctggtctcgctggcttggagtgaagctgcagaccttcgcggtgagtgttacagctcataaaggtagtgtaaacccaaagagtgagcagcagcaagatttattgcgaagagcaaaagaacagagcttccacagcatggaaagggacccgagcgggttgctgctgctggcttgggtggccagcttttattcccttatttggccctgcccacatcctgctgattggtccattttacagagcgctgattggtccattttacagagtgctgagtggtccattttacacagtgctgattggtccgtttttacagagtgctaattggtgtatttacaaacctttagctagacacagagtgctgattggtgcgtttttacagagtactgattggtgcgtttacaaaccttgagctagacacagagtgctgattggtgcatttttacagagtgctgattggtgcatttacaaacctttagctagacagaaaagttctccaagtccccactcgacccaggaagtccagctggcttcacctctcactgggctgaagtgattctcgtctcagcttcccgggtagctgggcccacaggcacctgcaaccacgcttggctaattgttttattttttgtagagaccggatctcactatgttgctcagggaggtcttgaactcctggcctcaagcgaccgtccagcttcagcctcccaaagtcttggggattattggcataagctactgtgcctggccagtttcagtcttttaaaatttattggccagtacagtgactgatacctataatctcagcattttgggagaagaaggccagaggatcaattgagctcaagaactcaagacctgcctggactgtaacatactaagacctcatatctagaaaaaattttaaaacttagctgggcatggtggtacatgcctgtggttcctgttactgaggaagctgaggtgagaggatcccttgagcctgggaggttgaggctgcagtgagctatgatcacaccactgcacttcagcctggacaacagagtcaggccctttctcaaaaaaaaaaaaaaattattgagacttgttttatggccatgaatatgttctatcttggtgaatgttccctttgcacctaagaagaatatgtattctgctatttgttggtattttggtaaaaatgtaaaattaggttgagttgttcatagcatcttgcaggttttttttttttttttttttttttgaaacagagtcttgctctgtcacccaggctggaatgcagtggtctgatcttggctcactgaaacctctgcctcccaggttcaagcgattctccttcctcagtctcccaagcagctgggattacgggcgcctgccaccatgcctagctaatttttgtatttttagtagggacgggtttcactgggttggtcaggccaactcctgacctcaggtgatccacctgtctgggcctcccaaagtgctgggattacaggcgtgagccactgtgcctggccagtcttgcaagtcttctatatcatttccttgtttcatcaggtgctgagagaggaatgtggaaatcttcaactaataattgtggagttgtctttttcaccttttagttctatcagatttggcttcatgtattttgaagctcccatgtaaggtactgactgtatctacatttaggacttttaaaagttcatggattaactctttgatgattatgaaatatccttctttattcctggttataatctttattctgaaatctgaagtttactctgtttgatattaatatagcccctctgactttcttttgattcatgttagtatatttttctatccttttaaactatctgtgtctttattatttaaagtgtgtttctggctgggtgcagtggcttacacctataatcccaacactttgggaggccaaggagggctgatcacctgagttcaggagtttgagaccagcccagcaacatagcgaaaccccatctatattaaaaatacaaaaattatccaggtgtgcgggggtctgtcctgcagaccctgacccaatgatggatgaataacgtgcactgatacagatactctgctttgccagtctgactgagcatcagggctacttacagactcccaggagagtgctgtaaaaagttgcgacctgggccttgaccagccagccagactcatgtttattcagtaaagattaattgacaaaggcttgagtcaacaccattagagggtaattgaccttgcagacatcccagatagaaagcaattaagcacctgcggtagatccaaggttagtcttaggaccacatgagtaaacaagctagttagataaactccccacattcctttgtatctactttaatttatttaattaaaggtaagcggactaggctgccttcagccagatctgttaccgaagttatgcaactctcaggccttccaagagggtttctggctattataactaaattttttcccaccagcctgactgaaccctcacacaggtggagacaggagaattgcttgaacccaggaggcagcggtagcagtgagccaagatcatgccactgcactccagcctgggtgacagagcgagactccatctccaaaaagagaaaaaaaagtgtgtttcttgcaggcagcatatagtcttgctttttatccaatataaaaacttttgctttttagttggagtgtttatttaaatttgttattgtcaataaggttagattcatatctaccatcttactgctcattttttgttcccatctatttgtactgtttttcttatgactgttttatttccattattaacttattaactatgtctctttgtagttgctctaaaatttgcaatatacatttttcatttcgtttatagagttagaaccttgcagcaatatacttatttgttccctcctgtcctttatgctattgttgtcatacatttgacttttattataaactctacaatacactgtgattatttttgctttagaccatcaatttttttttttgagacagtgtttcactcttgttgcccaggttagagtgcagtggcatgatcttggctcactgcaacctccacctcctgggttcaagtgattctcctgcctcagcttccccagtagctgggattgtaggcatacgccaccacgcccagctgattttgtatttttaggagaaacgggttttctccgtgttggtcaggctgctgtcgaactcccaacctcaggtaatccgcacacctcggcctcccaaagtgctgggattacaggcatcagccaccacacccagcctagaccatcagtcttaatgagaaaaaatgtcttatgtttacctgcatatttactatttttttattgagatggagtttcattcttgttccccaggctgcagtgcaatggtgccatctcagctcaccacagcctctgccttctgggttcaagtgattctcctgcctcagcctcccaggtagctaggattacaggcatgcacccaccatggccagccaattttgtattttcagtagagatggggtttctccatgttggtcaggctggtcttgaactcctgacctcaggtgatccacctgcctcagcctcccaaaatgttgagatcacaggtgtgggccactgtgcccagccttttttttttttttttttttttttttttttttgagacggagtctcactctgtcacccaggctggagtgcagtggcatgatcttggctcactacaacctccgcctctctggttcaagtgattctcctgcctcagcctcccgagtagctgagattacaggcacccaccaccatgcccagctactttttgtacttttagtagagatgagttttcaccatgttggccaggctgatctcaaactcctgacctcaggtgatccacccagctgggcctcccaaagtgctgggatcacaggcatgagccaccatgcccagccacatatttactatttttagcactctttattcctttgtgtagctctaaatctatctctggtatccttctgcctaaagaagtttctctaatatttcttgtagtatagatcctgtgacaatgaatcctctaacttttgcttgcttgaaaataactattttgcctttgtttttgaaagatactttggctaggtataaaattctaggttgataggtttttttccttatgtacctaaaaatattgctcccttatttgctagtttgcataaatttcttaggagaggtctgttaccactcttgcaggtaactttttttttttttttagacagagtcttgctctgccgcccaggctggagtgcaatggcacgatcttggctcactgcaacctctgcctcccagattcaagcaattctcctgcctcagcctcctgagtagctgggattacaggcgcatgccaccatgcccagctaagttttgcatttttagtagagacggggtttcgccatgttggtcaggctggtctcgaactcctgaccttgtgatccgcctgccttggcctcccaaagtactgggattacaggcgtgagccaccatgcccagcctcttgcaggtaatattttttatttctttcatcatgttgatcttttcctttgtatctttacagcattgtttttaatgcccttttctgctaacttaatccttgctataatttctgggtctgtttctgttgacttattttttttctagttttggatgacgttttcccacttcatcatgtcttgcaatttttattgaatgttggatattgtgactttatgttgttgagtgctgaatcttgtcacattccttaaagagtattggactttgggccgggcatggtggttcacacctataatcccagcactttgggaggccaaggcgggtagatcacctgaggtcagaagttctagaccagcctggccaacatggtgaaaccccgtctcaagtaaaaatacaaaaattagctgggcatggtggcaggcacctgtaatcccagctacttggggggccaaggcagaagaatcggttgaacctgggaggcagagatgcagtgagccgagatcacgccatcgcactccagcctgggggacaagagcaagacttcatctcaaaaaaaaaaaaaaaaaaaaaagtattggaacttggctgggtgcagtgactcacgcctgtaactccagcactttgggaggccaaggtgggtggatcacgaggtcagcagttcaagaccagccttgccaacattgtgaaaccccatttctactaaaaataccaaaaaaattagccagtcatggtggtgggcgcctatagttctagctactctggaggctgaagcaggagaatcgcttgaacccaggaggcagaggttgcagtgagatgagatcacagcactgcactccagcctgggtgacagagcgagactctgtctcaaaaaaaaaaaagaaaaacaaaaagagagtattggacatttcctagcaagcagttaagtgattgcaaattaccttaattgtcttgaggtttaattttaaatgattttaagtgattttagcatgggcctatagtagcctttattctagagctaatttagctgcactttttttttttttttgagacatactttcactctgccacccaggctggagtgcagtggcgtggtcttggctcactgcaacctcctcctccctggttcaggtgattctcatgccttagcctcctgagtagctgggattgcaggcacatgccaccatgcctggctaatttttgtatttttagtagagtccgagtttcaccatgttggccaggttggtcttgaactcctgacctcaggtgatccacccacctctgcctcccaaagtgctgggattacaggcatgagccactgcacctggtcattagctgcacttctaaatgtatgaccctcataaggtctacttgagtgctgcttgtgttcaacatgatctctccactgtgattggaaggaattcgaataatccttggccccaggtgacctctgggagtttaatcttaaggctctcaggtaattgttctttcttcagaaatcattctctccttatgtatacaatggtgaataaagtaaaatactaataataggaaaaaaaagaggcatcattctttcctggtctcatgtggtttcaccttatgcatacatagataagtgttgagcaaagattcaagtgcaccctacacagatttctagagctctactctgtaggtctttcctctcaggtacagctttatccctggtttctctttccatggtttgagttaccctcagtcaaccaaggtctgaaaatattaagatatttggagagagagagagagaccacattcaccaacttttactacacgaattgttatcattgttctagtttattataagttattgttggctgagcacggtggctcatgcctgtaatcccaaccccttgggggccgaggcgggcagattacctgaggtcgggagttcgagaccagcctgaccaacaggaataaaccccgtctctactaaaaatacaaaattagccaggtgtagtggcaaatgcctgtaatcccagctactcgggaggctgagacaggaaaatcgcttgaacccaggaggtggagtttgcagtgagcagagatcacgccattgcactccagcctgggtaacaaaagcgaaactccatctcaaaatgataataataataagttattgttaatatcttactgggcctaattcatcaattaaattttatcataggtgtgtatgtgtaggaagagcatagtttgtataaggcttagcacttccttgatttcatgcgtccactagggatctgggaaagtattcctcttgcataaggggagactactgtatgctgcttcccaaattctgctgtatgggcttcccaaaattcaagctgtgtctcaagtcagtgaaaatcccaggctctgattagtctcttgctccttgggttgcagtctgggaattccctttaagcagtaaccctggccatggtaggactcacctcccattgtagcctcccaggtggctgtgattacaggcgtgagccactgcactcagcaggaaagcattgcattttgtacaatgctttactagtaagaagtaatcagtaagtgataaggtattgtaacctgtggtctggactcacctgaacaggttggattaagtgggttgatgcctgccatttaaccctttgtcttcgttgttatcactgaactcatacggttgccttggaaataacatagagagattgggtggtcctttgaggcccagggctctgttttttaaatgccattttggccacctgcagaatgattaggggactcactgaactcatagattgctggacaccataccagggccctgggaatgtgaaggcttcacagacttctcagtcaatgtttaagcatgtacgagcttgcaaacctttgacctacagtcatctaaagcagaaatcaattccaaatcccagggcttgggggcgagaatcagtttctcctaggtgtataagtggatatttagtaaaccaagtaaagaacaaccttatggccaggcgcggtggctcacacctgtaatcccagcactttgggaggccgaggtgggtggatcacgaggtcaggatttcaagaccagcctggccaagatggtgaaatgccatctctactaaagatacaaaaattaggccgggcgcggtggctcacgcctgtaatcccagcactttgagaggccgaggcgggtggatcacaaagtcaggagatcgagaccatcctggtgaacacggtgaaaccccgtctctactaaaaatacaaaaaattagccgggcgtggtggcaggcacctgtagtcccagctactcgggaggctgaggcaggagaatggcatgaacccaggaggcagagcttgcagtgagctgagatcacaccactgcagtccagcctgggagacagagcaagactccgtttcaaaaaaaaaaaaaagatacaaaaattagccacgatggtggcgggtgcctgtagttccagctacttgggaggctgaggcagagaattgcttgaacccgggaagtagaggttgcagtgagccaagattgcgctactgcactccagcctgggcgacagagagtactcggtcaaaaaaaaaaaaaaaatcacgactgtaatcccagcactttgggaggccgaggcgggtggatcatggggtcaggagatcgagaccatcctggctaacacagtgagaccccgtctctactgaaaatacaaaaaattagccgggtgtggtggtgggcgcctgtagtcccagttacttgggaggctgaggcaggagaatggcgtgaacccaggaggtggagcttgcagtgagccgagatcgggccactgcactccagcctgggtgacagagcgagactccgtctcaaaaaaaaaaaaaaagaacaacctttgaggttattccatatccattgaatcagctctttttatctaaatgtctatggaaagaaggctcaggaaggagaggaggttgtagaatgaagccactgaagttttccgggcaaatactgcctggctgaaaccctaccaagttattactctcttgactgtaggctgagtcatgccaggtgacttcctgaaagctgctgttgctcctgatgcttcaccgccgttgtaccatgtggcacacatcaccacatcacaaagcattttggttgctgaagtccccatagggcctaggagagctttgtggtgtccatcattatatcctcaggatctagccaagtacccatttcccagaggaatgaacaggcaccaaattctccatctactgtgatgagtttacccttcagagtctttcttctttcagcagggaccggaaccaccttaccctctctgcatctcccacctcttatgctgaacagctctcccaggtcaagcctcaggggtctgccctggtttatttactagttctgaggatcagtgtcctaataagcaacctcttaagaggatcaacccagctttcttcactgaatcttttcatgttgtctttgagggatctcacagggcgcattaatgaattcattttacacattcagttctaccttaggtactggtctgactgtctcaagtctcacattgtctatggcataaaccttaagaaaccctgcctttgtctttcacagtggtcatctccatcagaggcaactgaaagtttcttatcaaaagaaatttggttgccacccccacagttctacgaagtgagaagacttgcaaactttgcctctctctctgacttgcacaaattttgtttgggtcgtgcattagaaggactggaaaggtggctgccgatcatcttgttaactgctgatgggatggtccatcttttaccaggtaaaccagtgaagcatcggtgcttttgttagtattcacattcagtgccctgggctgcatggctgtattgcccaacgtagagacaggaattacagtctgtgttttgtaatctacagggtattagctaagtaagatcaaagcctataaaatatccatattattataaccagaaattctgcataatgtcatatacatacacatacatttatattaatatatttcctagacattgacaaaggtctttctcatataatttctcactttttttttttttttctgagacagtttccctctgtcacccaggctggagtgcagtggcacaatcttggctcactgcaacctccacctcccaggttcaagcaattctctgcctcagcctcccaagaagctgggattacaggtgcccaccactgtgcccggctaatctttgtattttttttttagtagatacggggtttcaccatcttggccaggctggtcttgaactcttgaccttgtgatccacccgccttggcctcccaaagtgctgggattacagtcatgagccaccatgcctggctgatttctcacttttttgcattttaagtttgaattacgagaactcgtaagttgtcatctaatttgaattagggagctttttttttgagacagagttttgctcttgtcacccaggctggagtgcaatctgggctcactgcaacctttgcctcctgggttcaagcgatacttctgcctcagcctcccgagtagctggaattacaggcatgtgccaccacgcctggctaatttttttgtattattagtagagacagggtttcaccatgttggccaggctggtcttgaactcctgacctcaggtgatccgcccgcctcagcctccccaaattctgggattataggcatgagccactgtgcccagccaactttgtttttttttttcagttggacataatttcaattgaaattatgaattatgaaattatgaagaaaataaagtaaaatgttaactctatctcaactgaaaatacaaaaaaaaaaaaaaaaaacaaattagccaggcatggtggcacacacctgtaatcccagctgctcaggaggctgaggcaggagaatcacttgaacccaggaggtagaggttgcagtgagccaagatcatgccactgcactctaacctgggcgacagagcgacactctctgtcaaaaacaaaacaaaacaaaaggctgggcgcggtggctcacacgtgtaatctcagcactttgggaggctgaggcgggtggatcacctaagggcgagagttcgagaccggcctgaccaacatggagaaatcccgtctctactaataatacaaaattagctgggcatgggggcgcatgcctataatcccagctacttgggaggctgaggcaggagaatcacttgaacccaggaggcagaggttgtggtgagctgagattgcgccattgcactccagcctgggcaacaagagcgaaactccatctcaaaaaaaaaaaagatttattactcaacctacagtgggaaaatttagcagttttgatggaatttctctaaattaacctgaagatgataagaacagcccactttgaaacatcaaaagtatatgaatatcaaggccaatcttaatatcagtattgaatagaataaagagagtcatgaactggtataatagttacagttcacagtggaaacataccagtcacagatgtttatgggcccaaagaaaactcttggctggggtgttgtaaggggatattaaaaacacaagaaagaggacaggcgcagtagttcacgcctgtaatcccagcactttgggaggccgaggtgggtgaatcatttgaggtcaggagtttgagaccagcctggtaaacatggcgaaacctgtctctactaacaatacaaaaattaaccaggcgtggtggcagacacctgtgatcccagttactcgggaggctgaggcatgagaattgcttgagcccaagaggtggaggttgcaatgagccgagatcgcgccactgcactctagcctgggcaacagagtgagactccatctcaaaaaacagataaaaaaacacaataaagaaattgaggtaagctcatagaattagattagttaacaactatctcagttccaaacatattaaatagatcaaaataaatactgatttaacaactatctcagttccaaacatatgaaatagataaaaatactgatttgtatttcattagtatattggagtgatttataaaataatactcgatggaattaaaattttatactttctgccatggtgaaaaataattttgtatttaaaaataaaatcagattttttcctttttcaggtgatgagctatatttagaagattcagactttttggaaaatcttatgtctactgaaaaaaagactgaggaaatcatgaaggaaggcaagcagtttcaccggatagtgacataccatcgccacctttatgatatccacgtgactgttcagccaaagtataaacacgtttatcctaagaactctgtagtaagaaaaagccatttgtagggtgcttaagcttgtttgtaaaatggcctacttgaagtcctcatgaataatgagggttgactttcatttgcttgaaacttaaggaagtttgtgcctataaaagttactgcaattcagtatttctttatttttttcgagacagagtctcaatctgtcgcccaggctggagtgcagtggcatgatataggctcactggaagctctgcctcaggggttcatgccattctcctgcctcagcctcccgagtagctgggactacaggcgcccgccaccatgcccagctaatttttttttgtatttttagtagagacgggttttcaccgtgttagccaggatggtctcaatctcttgacctcgtgatacgcccgccttggcctcccaaagtgctgggattacaggtgtgggccaccacacccagcctttttttttttttttttttttttttttgagacagagtgtctcactcttgcccagaacccaggctggagtgcagtggcccaatctcggctcactgcaacctccacctcccaggttccagcgattctcatgcctcagcctcctgagtagctgggactataggcatgcaccaccatgccccactaaattttgtatttttagtagaaacagagtttcaccatgttggccaggctggtctcgatctcctgacctcatgatctgcccgccttggcctcccaaagtgtgggattacaggcgtgagccactgtgcccagcatggtgtttcttatatcaggtgttttagggagctcgcttgcttattccattctttaatccttacagtgtgccacacgtataaagtttataacgtattaatgatctcattacccaaaaccagaacataatttcacaagggttcctacttctgtattgttttattatctcaaaaatttaaataacatgttctgctgtttattgttcttgttatccactgtattagcaccttccctgatgtgctttggaggttgatcaatgaatttctgagactttctgctggaattactttaagggtgtcttattagatgatgaaaagttggctgagacacccttcaagtgaccatgtcattgttttcttgctatgtctttagcttaatgattaagatacaattctttttaaaatcaaatggtattagttattatgtttcccaaattagaaatcgattttagttaacattttattttattttattctattttatttatttttgagacagagtctcgctctgttgcccaggctggagtacaatggcgcaatctcagctcactccaatctccgcctcccaggttcaagcgatttttctgcctcagcctcccgagtagctgggattacaggcacccactaccatgcccagctaatctttgtatttttagtagagacggggtttcaccatgttggccagtccggtctcgaacttctgacctgaggtgatctgcccaccttggcctcacaaagtgctgagattacaggcttgagccaccacgcctggcctagttagcattttaaagaaacacaaagccataacaaaaaccatcattgtttgtattccacactgttaatgaatgtaaagaggttagaaatgtagtgtttgattaatgatgtttatttttactgtatttaatatgagtaatttttcatcatctttcaagaggaataatgtttattgattaaaggtgagaaatgatagttaagacaccaattccatgtccagatctttgactgtatcatgcattgtacaattgatttcatattttatgaaatgccttaattttcctactataacataaagacaatgatgaataaagtttatgtgtatgattaaatccagattagagaactatatctagcacagcagtcctcagcctgggcacttttgccctagggaacatttggctatgtctggaaacatttttggttgttgaaactgtgggcagagtgggtgggtgggggagtatgctactaccatctagtagtagggagaggccagggatgcaactgaacagcctgcaatgcgcagtctcacccatagcaaagaattacctgaccaaggatgagacacccaatctaaagtaaaatctttttttttttaaataaatggttccaatatgtaaattttgagaaccacagatactattattctgtctgccttttgaatctacaaaaatgggaaattacgtccaattggaaaaaaaaaaaaagttggctgggctgggcgcagtggcttatgcctataatcccagcattttgggaggctgaggtgggcggatcacctgaggtcaggagttcaagaccaggctggttaatgtggtgaaaccccatctactaacaatacacaaaaattagccaggcatggtggcctgtaattccagctactcaggaggctgaggcaggagaatcgcttgaacctggaggtggaggttgcagtgagcccagattgcactccagcctgggtgacaagaggaaaactgtctcaaaaaaacaaaaacaaaaacaaagtgtacaaaaatttttgttgtcttttgatttttttgagatagagtctcactttgctgcccaggctggagtgcagtggtgcaatctcagttcactgcaaccttcacctcctgcgttcaagcaattcttgtgcctcagcctcccaagtagctgtgactataggcgcccgccaccacacccagctaatgtttatatttttagtagagacaaagtttcaccatgttggccaggttggtcttgaactcctgacctcaggtgatctgcccgcctcagcctcccaaggtgcccgggattataggcatgagccaccatgcccagcctagctttgtcttttgactctcaaagattactagaatgttgccgctggaagggacctcattgaacaccatgattttgccagtgagaaaaccgagacacgcagctggttagtgccacagtcaactccctcttcactggagttgccatggctcagtgggtgatattagaagatgtcatgataaagtaatatgaccagtttttcttcatagaaaagatcgttttcacaccacgtttccctcatgtatgcttttttttgtttttgtttgtttgtttgtttgtttgtttgttttgagatggagtctcacattgttgtccaggctggagtgcagtggcgtgcttttggctcactgcaacctctgcctcctgggttcaagcaattctcctgcctcagcctcccgagtagctgggattacaggcacgtgccactgcacctggctaatggttgtatttttagcagagacagggcttcaccgtgttggccaggctggtcttgaacttctgacctcaagtggtccatccacgtcatgctggcaatacaggtgtgagccactgcgcctggcctgtatgttgttgtttttaatctgagtgaaccttgtctccttccaagaattccttttgggagacttgtcacatgacttcctacctatagtgatatcttgcccataccccataaccccaaataatatgagctgaaaaattaagttttagaattcagattactggtgttcatggcatttatgacacacagtttttcttttcttttctttttgagacaccttctcgctttgttgcccaggctagagtgcggtggtgcgatcttggctcactgcaacctctgcctcctgggttcaagtgattctcctgcctcagcctcccaatttgctgggattacaggcatcaaccaccacacccagctaatttttgtacttttagtagagacagggtttcaccatttgaccaggctggtctccaactcctgacctcaagtgatctgcccgcctcagcctcccaaagtgctgggattacagatgtgagcccctgtgctgggtcagaaatatttttaaagttaaaaacaaaattcggctgggcatggtggctcacacttgtcatcccaacactttgggaggccaaggtggaagaatcgtttgagcccaggagttcaagacctgcctgggcaacatagggagaccatgtctctataaaaaaattcaaaattagctgggtgggccaggcacggtggttcacgcctgtaatctcagcactttgggaggctgaagtgggtggatcacaaggtcaggtgttttgagaccagcctggtcaatatggtaaaaccccgtctctactaaaaatacaaaaattagctgggtgtggtgacacatggctgtagtcccagctacttgggaggctgaggcagaagaattgcttgaacccaggaggcggaggttgcagtgagctgagatcgtgccactgcactccagcctgagtgacagagcaagactgtctcaaaaaaaaaaaaaaaaattagctgggtgtagtggtgcatccctatagttttatcttctcaggaggctgaggtgggaagatacttgagcccaggagatagaggctgcagtgagcagcgataagattgcgccactgtactccagcctgggcaacagagcgagaccctgtctcaaaaaaaaaaaaaaaaagcaccatgagacagggtgaagaaaaaggaagccttgtgaatctttaaaaaagtgttttccgctagcaccagagttggaggagggcaggttacagtacaaatgcggaccccttttaaccttggggagactgggtggctggacccccagggcagtgagtgtcttgactatgggagtgtaatatataaatatttccattttctgtgagccatgttgtaaaaagattgggaaataccgtactgtagcacaggatctagtcaaacaaaaaagtgtctccccacaccaagaactgggagaagtctatattacccatttttgtggattgggaactgttttgggacttcctatttaagatggggttttgctatgttgccaaggctgggctccaacttctggctcaagggatcctcccatctcaccctcccaagtagctgagactacaggcacatgtcactgcacctggctacaagacctcctgtttattttattttattttatatattttttgagacagagttttgctctgttgcctaggctggagtgcagtggcatgatctcagctcactgcaacctctgcctccttggttcaagcgattctcctgcctcagcctcctgtgtagctggaattacaggtgcttgtcactatgcccggctaatttttgtatatttagtagagacagggcttcaccatattagccaggctggtctcgaactcctgacgtcaagtggtccacccacctcggcctcccaaagtgctgggattacaggcctgagccacctcgcccagccaggacctcctgtttaaatcagatcctgtcattttccatctctttttggcaaggtcttgagctttcaggtgagttggccataccaggtgccttgattggaggggaggccttgtcaacctaatttcaggaacaggtgaacatcacgcactttgcagctgtgtttttctcccgactggcagctacacacctttcctctgcaaccatcctgcctgagagtttaagtgcatgttatctgtgggacctcgtgcaatccagttttcttatagaactgcatgcttatgtgagcattctgttccccaaataataactccacagtttccatgctctctccaaactcttgcagtcttttgtcatcttgttggttcccttactagcaaattaactcgtttagactcggagagccctgccagttgaagtccagctgggaagaaatccaggaccaggaacctttccaaaaggtgcagatcaaatggaaatgttgccaggaggccacgaagacccagggattcatgactgtccaggactcttcctcaccaccaaggcttccagctcacagcgtttaaggggtgtaggctggcctagagaaagcaggaggacaggggccccttagcaggcaacaaggaccaactgagggcctggtgtggtggttcatgcctgtaatcctagctgctcagggggctgaggcggaaggatggcttgagcccaggagttcaacaccagcctgggcaacacagcgagacccccatctctacaaaaaaattaaaaaattatccaggcgtggtggtgcatgcctgtagtcccagctacttgagaggctgaagatggaggatcaactgagcccaggaattcaaggctgcagtgagccatgattgtgccactgcactccagcttgggcaagagagccatatcctgtctctttaaaaataaaataatgaacttgtaaccacctaatgggttcaccttgcccgctgcctagacagagccaatttatcaagacagggaattgcaatggagaaagagtaattcacgcagagccggctgtgtgggagactggagttttattattactcaaatcagtctctccgagcatttgaggaacagagtttttaaagacaattgggcgggtaggagcttgggaagtggggagtgctgattggccaggttgaagatggaatcagaggttgttggagtttttcttgctatttactcttcctggttggtttggcagaactggttgaggcagattatcggtgtgggtggtgtcagctgatccactgagctgattcaaggattgttgtctcatgcctccctaaaatgtaaaagaccaagtgaggcaggaaaatagggtctggaggtagggaacataaggccgattcacgcttcagctataaggggaaataccctctccatagggcatacaccgagtaaatgacttcgtaactttacttcaccgtcttcatttacatcgggcgtaccccaagcagaaggtatttaaattcacagaaattctgccgggcctttgagtccctgtgttcaggcctgctcccacactgtggagtgtactttttcaataaaacccttcattccttccttgctttgtgtgtgccttttgtcaaattctttcttcaagacaccaagaacctggacaccctccaactttaacacaagctgtgcctcgaccacgtctagcaaatgtcgttaggacttcctgtgtcaggggcgcctgtcctcaaccttggcaaaattttttgttttgttttgttttttgagacagagtctcactctgtcgcccaggctggggtgcagtggcctgatctcagctcactgaaacctctgcctcccgggttcaagcgattctcctgtctcagcctcccaagtagctgggattagaggcgctccccaccatgccaggctaatttttctatttttagtagagacggggtttcaccatgtcgaggatgctagtctccaactcctaaccttatcaggtgatccgcacccctcgcctcccaaagcgctgggattacaggcctgagccacctcgctctgctggccaaataaactttctaaatgaactgagacctatctcacattttcaggattcacaggctcttatcaattttgtttcagagtcaaaccatggactgaattccttcccaaggttagttgggcttccgcccaggaataaacaaggacagcttaaaggttagaggcaagatggagttgattaggtctgatttctttcaccatcacaatttcctcagttacaattttgcaaaggtggtttccaacggactcagccgcacgcggcccctctgtccctccgggggacaggcgagtgtccctggggcctgcagggcagtcctgctggctgcaaaagagagaatcacgcgacccctagccgggcctcccagggcctccgcgcgtcagtcctcctggccaccgcgtggcgctgtgccttacgttgttgggccgttgggtggaccacgtggtctccgacgcctcaaggcctgctcagcgtgcgcgggcatccggtgggtgcgggaggcccgaggccaggcaggcagggatcccgcagcgaggggctggttactgccaggacggagcgcattgcctcgagccgaccccggggtccgcgagggctcctggggacgaggagtgtggggcacctgccgcggggggcccaggcgctaaaggtggagggaaggaacgcactcgcggcgggggcctggccggggcggacgcagccagcctcacccgcgacggtaggggacttccagggcgagggggcccatctgccctcgggcgccaggaggatgctccagctcctggtgctgaaggtgagcgccgccaagccagacccacgccagacccacgcagtcccccacccccaccccagccgcgcacagcctcccacccccaccccagctccgcacagcttcctacacccaccgcagccccgcacagcctcccacccccgaccccaaccctacacagcccccacccctccccccatcccagcctccacatccctccacacccactcctcccagcccacgcatcccccccatgtccactccctctcagcccacacctactccccacgcccactcctcccccaacccacacatcctcccacacccactcccacccagctccacccccacactcacacatgcccccaccccatctcactgctgcacactccatcccactcccacacatcccaaccccgtatatcccatgccgccacaccacgcccccactcccaccccactcccaccccaacccatcccactcccaaccccacacacccccaactcctaccctagccccagctcccacccgtttccttatcgctgcccaccccacagtcacaccctcgcccctgtccccaccccatccttattcccaccgcccccactcacacctccaccccaacatttcatccccccacactcagccccacacaccccaccaccaccccatctccactcccacctgcaccccagccgcagcccaccccacctccactccaaccccaccccgccctcccccacctgaaccctccctgcgcccccaccagggggcaccccgggctgggagctggggtagaacccggatgagcccgggtttcacgggccctggcgtgctccgggatgcacctggaggagcgcggaattggttgctcctccgaatgctcgatcacccgggccaagcgacactggcgtccccagggccccgctctccgtactccacggggcccttaggctcggcgcctggacagggtcgggtggcccgggcagccccagcccatgggtccgggcttccctcatgcccccagtctctgttgccctatccgctcaccgcgtgggctctgcgtgggcgttgttctagtcctcggggaagggacgcccgcctggacccttgcttttcccccttggagtccagtgagggctcattggtgaaggggaaagcgttgctggaggaaggagttgacaggccagagcagaggggtgggtatgggttattggagaaaggaaatctaaatactttgaaaatcacacttcagtgggcccaggagctggacgtagcagattgtgggattgttttattttattttattatttattcatttatttttttgagatggagtttcgctcttgttgtctaggctggagtgcagtggtgtgacctcagctcactgcaacctccgcttcccgggttcaagtgattctcctgcctcagcctcccgagtagctgggattacaggtgcctgccaccacacctggctaatttttgtatttttagtagagacagggtttcaccacgtggctgttctcgaactcctgacctcaggtgatccacctgcctccgcctcccaaagtgctgggattacaggcgtgagccaccgtgcctggcctattttattttattttattttattttattttattttattttattttgagaaggagtcttgctcagtcacccaggctggagtgcagtggcgcgatctcagctcgctgcaagctccgcctcccgggttcacgccattctcctgcctcagcctcccaagtagctgggactacaggcggccaccaccacgcctggctaatttttttttttttttgtatttttagtagagacggggtttcaccatgttagccaggatggtctccatttcctgacctcgtgatccacccgcctcggcttcccaaagtgctgggattacaggcgtgagccaccacgcccggccggtgcgatttttaaaaccagcactctcctgctcttacttgatgtcttgtgtaatctctctgaacaaagattcacaaatgtttgaggaagctgactcttacagagaatttgccctcagacttttaggtgttcagatccaccaggcgagctcctctcctccagtcagatgttgtctgtcagtcctaacgatgctagtccgatttcttctttagaagagacagggctcttccagggctacacatcctgaaacatgcacaaccatcccggcagaactttgatagcaggagctggacttgctgcctcctgttcgcgaacccctttcctctcagttgggcccaggaactctttcatttacctgctcaactctgatctgcccccacttctggccctcaaccagctcaccccctgagcaaattctgtcctgaataggagtgtctccccaagtgctgtgtaggtaccacctgtcctgcagatgaagttagcttttacaaggatgaaatatttttccctccatgtatccatcaacagatgactgggtaaacggaaggtggtttgtacatacacaatggcatattatttagccttaaatatctgagaaatctttgtctgactcacagtcacaaagatttttttcccccatgtatccttttattatttaaaaaaaattttttttttttttttttgagacggcgtctcgctctgttgcccaggctggagtgtggtggagcaatctcggctcactgcaacctccgcctcccgagttcaagcgattctcctgcctcagcctcctgagtagctgggattacaggcgcgtgccaccacagccggctaatttttatatttttggtagagacggggtttcagcatcttgtccaggctggtctgcaactcctgacctcaagtgatctgccctcctcggcctcccaaactgctgggattacaggcaagaactgctgcacctggcccccccatgtaaccttttagaagttttataattttatattttacatttagatatatgatccgagttaatttttgtatatggtgcaaggaatggatgaagtttcatttctttgcacgtgattatctaactgttccaacatcatttgttgaaatgactatccgtcctcctttgtgtcttatcaaaaatcaattgactatatgtgtgattatattcctgttatattgatttatgcacaataccacactgtcttattactgtagctttataggtaactattttgttttttttttgagacggagtcttgctctgtcccccaggctggagtgcagtggtgtgatctcggcacagtgcaagctctgcctcccgggttcatgccattctcctgcctcagcctcccaagtagctgggactacaggtgcccgccaccatgcccggctaatttttttatttttagtagagacagggtttcactgtgttagccaggatggtctcgatctcctgacctcgtggtccacccatctcggcctcccaaagtgctgggattacaagcatgagccaccgtgcctggccctttatagataactcttgaagtcaggtgatatgagtcttccaactatattctttttcagaattgttctagttccttagcttttgtaatatgcattttgtaattgcttgctgagtctaccaaaaaaaaaaaaaaaaccatgctggaatggagttgtatttatagatgggttcagagaaatatatattaatacagtatatctatacttatttagatctttcatttctttccgtcagtgttttataactttcagcataggaattttgcacatatttttaagatttagacctttaagtaattactgggttttgttttgtttttcagtaaaagacacagggtcttgctttgttggccaggctggagcgcagtgctgtaatcacaacttactgcaacctcaaactcctgggctcaagggagcctcctgccccagcctcctgagtagctgggcctaaaggcatttgcccccactcctggttaattaaaaaaaatttttttagagacagggtctcactgtgttgcccaggctggtttctcaaactcctgggctcaagcaatcgtcccacctcagcctcccaaagtaatgggattatgggaatgagccaccactcccagcctttttgtaattttaaatttccaatttccatttctggaatatagtaatacgattgaattattattttttaatttaattttaagttccaggatacaagtgcaggacctgcaggtttgttacatagatagacatgtgccatgttggtttgctgcaactattaacccatcatctagttattaagccccgcatgtattagtttttttatcctgatactctccctcccctctgtcccataggccccagtgtgtggttcccctccctgtgtccatgtgttctcattgttcagctcctgtttataagtgagaacatacggtgtttggttttctgttccagtgttagtttgctgaggataatggcttccagcttcatccatgtccctgcaaaggatattatcttgttactttttatggttacctagtattccatggtgtatatgtaccaaattttctttatccagtctatcactgatgggcatttgggttgattccatgtctttgctattgtgactagtgctacagtgaacatacgcatgtatgtctttataacagaatgattgatattccttttggtatatacccagtaatgggattgctgggtttttctggttctagatctttgaggaatcaccacactgtcttccacaatggttgaattaatttatactcccaccaacagtataaaagcattcccatttctccacagccttgccagccatctgttgtttcttgactttttaataattgccattctgactggcatgagatggtatctcattgtggttttgatttgcatttctctaatgatcagtgatgttgagctttttttcatatgtttgttggctgcataaatgtcttcttttgagaagtgtctgttcatgcgctttgcctactttttgatggggtttttttcttgtaaatttgtttcagttccttacagattctggatattagatctttgtcagatggaaagattgcaaaaattttctcccattctgtaggttttctgttaactctgatgatagtttcttctgctgtgcagaagctctttagtttaattcaatcccatttgtcaatttttacttttgttgcaattgcttttgatgtttttgtcatgaaatcgttgccgttgcctatgtgttgaatggtattgcctagatttttttctagggttttttttttatagttttaggttttacatttaagtctttaatctatattgagttaatttttgtataaggtgtaaggaaagggtccagtttcagttttctgcatacggctagccagttttcccagcaccatttattaaatagggcatcctttccccattgcctgtttttgtcaggtttgtcaaaaatcagatggttgtagatgtgtggtcttatttctgagatctctattctgttacattggtctatgtgtctgtttttgtaccagtaccatgctgttttggttactgtagccttgtagtatagtttgaagttgggtagcatgatgcctccagctttattctttttgcttaggagtgtcgtggctatatggactcttttttggttccctatcaattttaaagtagttttttctatttctgtgaagaatgtcaatggtagtttaatggaaatagcattgaatctataaattactttggacagtacggccattttcacgatgctcttcctatccgcgagcatggaatgtttttccatttgtttgtgtcctcttttatttcctttgttagttgtattcctaggtattctctttgtagcaacaattgaattatttcaataatcttgtgccttgtagccttgtaaagtcaattattagttctggcatatattatatattttttattgtaaaaaacatgtaacgaagtttgccatctcaaccatttttaagtgtacagttcatggtattaaatacattcataatttttttttttttttgagacggagtcttgctctgtcgcccaggccggaatgcagtggtgcgatctcagctcactgcaagctctgcctcctgggttcacgccattctcctgcctcagcctcccaagtagctgggactacaggctcccaccaccacgcctggctaattttttgtatttttagtagagactgggtttcactgtgttagccacgatggtcttgatctcctgaccttggatccacccgcctcagcctcccaaagtgctgggattacaggcgtgaaccaccacacccagtcaaatacattcataatgttgtgcaaccatcaccaatgtccctctccagaagtctttttccttttgcaaaactgaaactctgctttctctatgaatttgactactctgagtgcctcatataagtggaatcatacagtttatccttttgtgactggcttatttcactcagtataatgtcctcagggttcattatgttgtaccatgtgtcagaatttcctttcttttgaagcccagtgcagtgatgtgaacgtgaggacccaactacttgggaggctgaggtgggaggattgcttgaggtgaggattgcttgaggtgaggattgcttgaggtgaggtgggcaatatagcaagaccctgtctcttaaaaaaacaaatatatgtctttttttaaaaaaagaatttccttccttgttcagactgaataatagtccattctgtaccacattttgcttatccatttatctgttgagggacactgggttgcttccacattttagctattgtgaataatgctgctatgaacacaggtgtgtacgtatctcttcaagatctttcaattctcgtggatctacacccaatagtggaattgctgcattatatggtaattatagttttaattttttgaggagccaccctaccattttccacagcagctatgccgttttacattcataccaacagtgcacaatgattccagtgtctccacagccttgccaacacattattttctgttttaacacaccttccagcacactgaattttcaggttttttttgacagtagttatcctcatgagtgtcaggtagtatctcactatggttatgatttatatttctctaatgattagtatgttgagcgccttttcatgtacttattggccatttgtatatcttctttggagaaatgtctattcaaatcctttgcccattttttaattggtggtttgggtttttgtattgttttaggagttctctgtatattctgggtattaatcccttatgagatataagccttgcaaatattttcccccattccataagttgactttctactgtggtgatagtgacttttgatgcacacagtttttaaatttcaatgaagcccagtttgtctattttttcttttgttgcctgtggctttggtgtcatatccaagaaatttttgtcaaatccaacgtcacaaagcatttgctctgtgttttcttttgtagttttaggccttccatttaggtctttgatccattttgagtatggtgtcacataaaggtccaaatttattctttcatttttatttttatttttattttctttttgagacagagtctcactctgttacccaggccggagtgcagtggtgcaatttcggctcactgcaacctccacctcccaggttcaagtgattctcttggcgtagcctcctgagtagctgggattacgggcatgtaccaccacacccggctaattttgtatttttagtagagacgggatttcaccatgttggccaggcttgtgtcgaactcctgacctcaggtgatctgcctgctttggccttccgaagtgctgggattacaggtgtgagccattttgtctggcctccaagttcattcttttgcatgtgaatatccagttttcccagtgctcatttgttacaaaacctttccctgaatggttttggtacccttgtcaaaaatcatttgactagaccacaagggtttattctggactctctattctactctgttggtctatatgtctgtctttatttcagtaccatactgttttgattactgtagctttgtagtaaagttttgtgatcaagtgtgagtcctccagctttgttcttttttgatattgttttggctattttgggtcccttgggatttcatgtgaattttagaatgtgcttttctatttctgaaaaaatatcattgtggattttggtagggattgaattgaatgtgtagattgctttgagtaggattgacatcttaatgatattaaatcttccagtcaatgaatgtgggatgtctttccatttatttatgtcttctttaatttctttcagcagcgttttataattttcattgtagttctaattttttaatagactccttaaggttctctgtgtagacaattgtgttctttatgaataaagacaattttatttattcctttctaatcttcctgacagtctttttcctgtcttactgtactaactgggacctttagtacaatgttagcgagtataccccttgtgaaatttttcttttcctttttttttttttttttgtgacagagtctcactcttgttgcccaagctggagtgcagtggcgcgatcttggttcactgcaagctccgcctcctgggttcactccattcttctgcctcagccccctgagtagctgggactacaggtgcccaccaccacacctggctattttttttttttttttttgtacagatggggtttcaccatgttagccaggatggtttcgatctcctaaccttgtgatccgcccgtctcggcctcccaaagtgctgggattacaggcataagccaccgtgcctggcctaaatttttatttttcatttatgaaatttacgttttccacagcttgtgtgtgtgtatctatatctatacatgtataaatagatacatatctatatacatatagagtttccatttcttaagtgagattcttttgttttcaactcactctaaccatctcatctttaagttctgtatttataatagctgtttttaagtcctcgcctgttaattccaatatctgggtatcttgggttcactttctggtgactgctttttctttttcttttttttttttgttttttttttttgtgagatggagtcttgctctgtcgcccaggctggagtgcagtggcgcaatctcggctcactgcaagctccaccacccggtttcacaccattctcctgcctcagcctcccgagtagctgggactacgggtatctgccaccacgcccagctaattttttgtatttttagtagagacggagtttcatcgtgttagctaggatggtctcgatctcctgacctcgtgatccgcccgtctcggcctcccaaagtgctgggattacaggcatgagccaccgtgcctggcctaaatttttatttttcatttatgaaatttacgttttccacagcttgtgtgtgtgtatctatatctatacatgtataaatagatacatatctatatacatatagagtttccatttcttaagtgagattcttttgttttcaactcactctaaccatctcatctttaagttctgtatttataatagctgtttttaagtcctcgcctgttaattccaatatctgggtatcttgggttcactttctggtgactactttttctttttcttttttttttttttttttttttttttttgtgagatggagtcttgctctgtcgcccaggctggagtgcagtggcgcaatctcggctcactgcaagctccaccacccggtttcacaccattctcctgcctcagcctcccgagtagctgggactacaggtatctgccaccacgcccagctaattttttgtatttttagtagagacggagtttcatcgtgttagctaggatggtctcgatctcctgacctcgtgatccgcccacctcggcctcccaaagtgctgggattacaggtgtgagccacagcacccggctaaaactgcgtatttctttcagccttcccaccattggtcttctctggactccttggggtctcatttctgccaagaatgtgacaggtgttcttatgcagactttagggctccccctctgtggctctccgtttaggaattttaccctttaattctcaagctgctatggcagccccaaactctgttctctgattcctcaagccacaaacatgactttctccttgaattgcagctggttaacaccacgtggactggggaatgggctcaggggaaaagccgtgtaaaagtggatctcacccagggaagtttccttctttcaagggttgaatctccttcaggttctgcttgcttttggtagctcttcactgccttcaaatagtcatttttgtattttttccagggtttattattgttacccacaggtgatatagaaactattctattgtcactggaaccagaataactactgttcttttttctgatcatttgttataaaaatgttcaaaccttcagaaaagtagaaataatactagtgggaatacctgtattcttgccaccttgggcaaagatgtcatttttgcccaaatcttgagatgtcattttttctaggcagagttaggtaatacttttgaaaaatcatgagttcttggctgggcgcggtggctcacgcctgtaatcccagcactttgggaggctgagatgggcgaatcacctgaagtcaggagttcaagaccagcctggccaacatgatgaaatcctgtctctactaaaaatacaaaattaactgagcattgtggcgcacgcttgtaatcccggctactcaggagacttaggcaggagaattgcttgaacccaggaggtggaggttgcagtgagctgagattgcgccactgcactccaacctgggtgacacagcgagaccttttggtattttcaatccaaatttaacttttcactttatatttgtgtctttaacaatgaaaatcttggcttctaataacaatagtacataacaaaatacattccaggaagtctgactttcttccgtgtcccttctccatttctctcctccccttagaccatgatttgcatttactttggtttatctgccattattattttttttattatgagcagaatgtacttatattcacattgctttctctttcttacaaaagaagaatacaaatcaggcacagtggcttatgtctgtaatcctagcacttagggaggccgaagtgggaaaattgctcgagccccggagtttgagactagcctgggcaaaatagcgagacaccatctctattttttttttaattaaaaaaattttttttaacaaacaaaagtactaaaaacattgctctgaaccttgtgtttgtatattactatggatttttcagaatatgggagattgaggacatccgttcgttatttgagtcacaacacataattgagaattacatactgttggttatgtgttttagaattttatcttcggtctaaccatttaagcaaaggcatttgtcaagaatttgttaggtcacttaaattagaaacagtaatcgtggctctaaagtttattttgtggtactacttttaaatcatacgctgttctgtttgtcttttaaaaaatttacagattgaagatccaggttgcttctgggttattataaaagggtgtagtccctttttagatcatgatgtcgattatcaaaaattaaatagtgccatgaatgacttctacaacagcacgtgtcaagatatagaaataaaacccttaacattggaagaaggacaggtatgtatctaaatgttctttaatcactgtgtattgaaacaccactcaaaatataaactattttggcaacgatgatgattcaagcttttagagtattttagtttcttacactcagtgccttgtgttaggtttttttttgagatggagtctcgctctgtcacataggctggagtacagtggcaccatctgggctcaccgcaacctccgtgtctcgggttcaagcacttcttctgtctcagcctcctgagtagctggaattacaggcatgggccaccacactcagctaatttttgtatttttagtagagacgggggtttcaccgtgttggccaggctggtctcgaactccagacctcaggtgatccacccgcctcagattcccaaagtgctgggattacaggtgtgagccactgtgcccagccagtgtaaggttctttaggttgcacaagattcaggctagtcatggaagggggtggccgccatgtaaggtccatgtggggcaaaagtagacagaatgtcatctacacccaggcattagggccatccctctggggctgggaaccagggggttatttgagatcccacagaggtgtagggatctcagcaaagagggaatagggtcttcagtgtagggccaacgcctcccttttggttgcatgactttggccaactcagatgtctttgttctccttactccacgccgtggcccctccttgccttcttgcagactcagctctcactgccccttgtcatggttgccacagctcagctacttttcagaagagagtgaatttttgtaatggtataataggaaaaggtttataaactctttatgagaaaaagcagaaataatttgaatccacttcccccaaatcatcattaataacataatttattttagtatatgtgctgccgaagcaagcacaataacataatttgtttccacgccattgactaattgaagaagttaaaccaggtcaattgtttttaaaaatattccacattttgggttgggcatgctggctcttgcctgtaatcccagcactttgggaggccaaggaaagaagattgcttgagcctaggagttttgtgaacagcctgggcaacatagtaagaccctgtctctacaaaagataaaaagattagtgggcatggtagcacgtgcctgtggccccagctactctggaggctaaggcagaagatcacttgagcctgggaggtaatagctgcagtaagctgtgtttgcgccactgcactctagcctgggcgagacagcgagactgtctcttaaaaaaaatatgcgtagccgggcgtggtggcccacgcctgtaatcccagcactttgggagtctgaggcaggtggatcacctgaggtcaggagttcgagaccagcctggccaacatagtgaaaccccatctctactaaaaatacaaaaaattagctgggcgtggtggcaggcacctgtaatcccagctactagagaggctgaggcaagagaatcacttgaacctgggaggcggaggcttcagtgagccgagatcacgccattgcactccagcctaggcaacaagagtgaaactctgtctcaaaaaaaaaaaaaatgtatatgtgtgtgtgtatgtgtatagttaaatataaagctttgggtagatttaaggttgcttctgtttttcaagaataggtgtactgtgaacttcatgtgaacttcatgttgaattgagagatgatgttttcagtgatgctgagattgaccagaggggacatcctgaccctccttgtggccttacctgtcagcattcatgtgatggcttctccattcagtgaccactgctgcctgaatcagctcttttattcaggcactcgatgtggggttttctctcattccttctgcattcatcagctggaattcttctgttatagaactttccctgatctcttaagactgtttgattaccctgaaataacactgttccttttttaaatttttttaatttatttttttaattaattaattttttttttttttgagacagagtcttgttctgttgcccaggctagagtacagtggcgccatctctgctcactggaagccccacctcccgggttcacgccgttctcccgccttagcctcccgagtagctgggactacaggcacctgccaccatgcccggctaatttcgtttttgtatttttagtagagatgggatttcaccctggtagccaggatggtcttgatctcctgacttcatgatccacccgtctcagcctcccaaagtgctgggattacaggcgtgagccaccgcgcctggcctttttaaaaattttttaaatcagaaggcctatgaatgcaaataatacagttcatactgcaaagaaagagaaattgtgtggatcagttttcaacttagtgctttgtgcctagttatcacatttttggtgtcgagagggtggttttgtttttctctcctcctcctccttttcttttcttttcttttttttttttgaagatgggggtctcactctgtcacccaggctggagtgcagtgactctatctcggctcactgcaacctccgccttttggtatcgagcaatcctcccacctcagcctcccaagtggctaggactaaaggcatgcaccaccacacctggctaatttttttgtattttttgtggtgacagggtttcgccatgttgcccaggctggtcacgaactcctgggctcaagagatctgcccgccttggcctcccaaaacgctgggattacaggcatgaatcactgcgcctggccctttacacttttaagtacaaacagacctcattttattgtgaattcgcagtaactatgtttttttacaaattgaaggtttatggcaacccttcatggagcaagactataggcaccatttttcccacagcaggtcctcacttcatgtctctgtgtcacatcttggtaattctcccagtgtttcgaacttttttgttattattctatctgttatagtgatctgtggccagtgatctttgaggttagtattttaattgttttggggtgccacgaattgcacccatgtaagatagtgaattttatcaataaatgtgtgttctgactgctccaccatctctctccctctccccaggccttcctgttcactgacacacaattgaaattaggccaattaataaccctacaatggcccctaagtgttcaagtgaaaggatgaatcacattaaattaaaagctagaaatgattgaacttagaggaagacattttgaaagctgagataggctgaaagctaggcctcttgcaccaaacagttagcaaagttgtgaatgcaaaggaaaagttcttgaaggaaattaaaagtgccactctggagaacacacaaatgaaaaaaaaaatgaaaaaagaagcagccttattggtaatatggagaaagttttattggtcaggatagaggcttagaaccagttactacattcccttcagccaaagcctgatccagagcaaggccctaactctcttcaattgtataaaggctgagcaaggttaggaagctgcagggaaaaaatgtgaagctagcggaggttggttcatgaggtttaagaaaagaggccatctccacaacataaagtgcaaggtgaagcacaagggctgatggagaggctgcagcagtttctccagatgtagctatgatcattgttgaaagtggacacactaaataagaggttttcaatgtatacaagacagccttctattggagaagatgtcttctaggacttccagagctaaataggagaagtcagccaggtgtggtggctcacacctgtaatcccagcactctgggaggctgaggtgggtggatcacctaaggtcaggagttcgagaccagcctggccaacatggtgaaaccctgtctctactaaaaatacaaaaattagccaggtgtggtggcggacacctgtaatcccagctactggggaggctgaggcaggagaattgcttgaacccgggaggtggaggctgcagtgagctgagatggcaccactgcactccagcctgggtgacagagagagactccatcttaaaaaataaataggagaagtcggtgtctttaaaggactaaagctttaaaggtcagagtggctttctttttaggggctaatgcagctggtgacttttaagttgaagccagtactcatttaccattccaaaagtcctgtgacccttaaagattatgctagctctactctatctgctctacgaatggaacaagaaagcctgaatgacagcacatctgttcacgcatggcttactgaatattttaagcttactgttgagatctatgctcagaaaaaaagattcctttcaaaatattactgctgagctgggtatggtggcacgtgtccacagtcccagctacttgggaggctgaagcaggaagatcacttgggcccaggagtttgagtccagcctaggcaatgtagtgatgagaccctgtctctaaaacaaaaaacaacaaacaattagtgctcattgacagtgcacctggtcactgaagagctctcatggagatatatgagatgaatgtggctttcatgcctcattttgaaggttggctggctgtgtgaattattaactattcatggtatttctacaagatgctttgacttcagcattaaatagaaatacccttcatcctttgtcaggatttctgttgaattattcgagttttgagttatgtgaggttctctagaacctgtgccttgcagtatggctgtactgtattttccaacttattcccaaggacagcaatctctatcagtccccttcctttctgtctgagcgcagctctcctgctggactgctttataaacctgtggttagcatacggtttattagttgagttggctgtggcctggcagtcctgtggtacagtcaggatgccaagggttgtcacctctgcagggtggttctccttaaaaggggctgcaggcatttacagatgcttcttaacttacgatgaggttatgtcctgataattgtaggtaaaaaatgggcttagtacacctaacctgctgaccagcctagcttaccctagcctacttaaatttgctcaggacacttaacattagcttatggttgggcaagatcacctaatacaaagcctattttgtagtaaagtttaaatatttatgtattttattgaatactgcacattatgtaaaaattgcaatagtttcacaccatcataatgttgaaaattgtaagttaaaccatcataagtcagggactgtgcacttattcagccatcaaacaggcagtttattgattgattgagacaaactctcattctgtcgcccaggctggagtgtagtggcgcgatctttggctcactgcaacctctgcctccctggctcaagtgatcctcctgcctcagcctcctgagtagctgggactacaggcacatgccaccatccctggctgatttttgtgtttttagtagagacggggtttttccatgttggtcaggctgctcttgaactcctgagctcaggtgatccactcacctcgacctcccaaagtgctgggaccacaggcgtgaaccaccatgcctggcccaggtagtttatttttaaaacattttattactgttatttttttgagacagggtctcactgtgtcacccaggctggagtgcagtggtgcaatcatagcccactgcagcctccaattcctgggttcaagcgatcctcccacctcagcctcctaagtaggtgagactacaggcacgtaccaccatgcctggttcaagtagtttttgaagacttagtatatgccaggcactgctaggtgctgggaatttggcagtaaacaaaacagacaaaaatccatgtcatcaaggagccagcgtccagttatgacagatagtaaacaaatgtcagaggccaataagagtcatggggaggctgggtgcggtggctcacgcctgtaatcccagcagtttgggaggccgaggcgggtggatcacctgaggtcaggagttcgaggccatcctgaccaatatgatgaaatcctgtctctactaaaaaaatttcttaaaattatctgggcctggtggcatgcgcctgtaatcccagctacttgggaggctgagacaggagaatcgcttgagcccgggaggtggaggttgcagtgagccaaggtcgcaccatcgcactccagcctgggcaacaagagcaaaactccgtctcaaaaaaaataaagagtcatgggtaagggagtggaaggatgagcctggtggcagcttcctgttggtcagacacatgattgacaatcattcctaagcattatttcctgatttaagaaggtaaatgaatgcatttttcttattttactttctaaaaattgtcctcagttaaggagtggaaacaattgtagtaagaaaaacagtgacctagtactcagacggcctgtgttcctgaggttttcttatgggcagagtggctcagcttgggtaggcccggcctcctggcatctctttcctctgctgtaaaggagaatgttgactgggatggttttgagagtaccttttacctctcttgttctttgatgaaatgttaacactgaccttaaaaaacctttctgttggccaggcgtgatggctcacgcctgtaatcccagcactttgggaggctgaggcgggcggatcatgaggtaaggagtttgagaccagcttatccaacatggtgaaaccccatctctactaaaatacaaaaattagccaggcatggcggcaggcacctgtaatcccagctacttgggaggctgaggcaggagaattgcttgaacctgggaggtggagattgcagtgagctgagattgtgccactgcactccagcctgggcaatggagtaacactctgtctcaaaaaaataaataaataaaaataactctctgtttattttgcaggtgtgtgtggtctattgtgaggagctaaagtgctggtgcagggccattgtcaaatcaattacgtcttccgcagaccagtacctggcagaatgtttccttgtggactttgccaagaacattccagtcaaatctaaaaagtatgtacatgtttatctcaccttacgctcttttcagagacaaatgtcagtttcaaaggagaacgtccattttaaagtacggggctagaggtcactacactgagaaaagacaaaactggagttctttagcttccagaaggggtgctttctgggtttcaggtctgcacccactgactggcagagtgggtgggcaggatgaaggctgaggtggctctggccctctcccactgtccgtcctggcaggacaggcaggttcagatggtgttctttgcatctcctggctgctctctgcatctcctggctactctctgcatctcatggctactctctgcatctcctggctactctgcatctcctgggttctctatcacctggctgctctctgcatctcctggctgctctctgcatctcctggggttctctctctatcacctggctactttctgcatctcctggctgctctctgcatctcctggggttcttcctgcatctcctggggctctttctgcatctcctggctgctctctgcatctcctggggctctctttgcatctcctggggctctctttgcatctcctggctgctgtctgcatctcctggctgctgtctgcatctcctgggtgctgtctgcatctcctgggtgctctctgcatctcctggtgctctctctgcatctcctgctgctctctgcatctcctgggtactctctgcatctcctgggtactctctgcatctcctgggtgctgtctgcatctcctgggtgctctctgcatctcctggtgctctctctgcatctcctgggtgctctctgcatctcctgggtgctctctgcatctcctgggcactctctgcatctcctggtgtgctctctgcatctcctggtgcgctgtctgcatctcctgggtgctgtctgcatctcctgggtactctctgcatctcctgggtgctctctgcatctcctaggtactctatgcatctcctgggtgctgtctgcatctcctgggtgctctctgcatctcctgggtactctctgcatctcctgggcactctctgcatctcctggtgctctctctgcatctcctgggtgctctctgcatctcctgggcactctctgcatctcctgggtactctctgcatctcctgggtgctctctgcatctcctgggtactctctgcatctcctgggtgctgtctgcatctcctgggtgctctctgcatctcctgggtactctctgcatctcctgggcactctctgcatctcctggtgctctctctgcatctcctgggcgctctctgcatctcctgggcactctctgcatctcctgggtactctctgcatctcctgggtgctctctgcatctcctgggtgctgtctgcatctcctgggtgctgtctgcatctcctgggtactctctgcatctcctgggtgctctctgcatctcctgggtactctctgcatctcctgggtactctgcatctcctgggtgctctctgcatctcctgtgttctctgcatctcctgcgttctctgcatttcctggctgctctctgcatctcctggggttctctctgcatctcctgcgttctctgcatcttctgactgctctctgcctcttctgggtgctccttgccggctgctctcctgcctgtcctcagtttccttgtgccctttagggaggcttggctgcaagaaagacacttccaggaggtagagagaaacgcctctctccacagaaggggggttgctggcatagtctcagggtgcacagagcagagcttgtactcatgtaggtatccctggttgtcctgcttaaatgagggagggtgtgaccatcaatgaggttgggagatggctcagaatgagctgttgccaagatggtgctgtgcagtcttcactgcttctgggaccacacgtgattgtgttcgttagaatacaccagcaacaagtcagtcttggtgttttgtgatgacttttccatagtttcccgtcccagggtaagaggatgtcagtttaataaatatgaggattctgatttcactgaagaaagagcaataccaaatagacttgattgtgataagaggtgtctattttgttttgttttgtttttttgagacagtgtctcactctgtctcccaggctggaatgcagtggcgtgatcttggctcactgcaatctctgcctcccagttcaagcgattctcctgcctcagtctcccgagtagttgggactacaggcgtgtgccaccacgtccagctaatttttgtatttttagtagagacagggttttgccatgttggccaggctggtcttgaactcttgacctcaggtgatccacccgcctcggcttcccaaagtgctgggattacaggcgtgagccactgcgccagccaagaggtgtctattgaatagaagaatttcatggcatacgtgtttatcagacattgggaatttgcagtacttactgtaagagtaggtgccattcgagcttgtgatcctgcattgcatacaaccgtaatcgctgcaaaaacaattattgtgtttaactgtttggggagcttttgtttttgcgtttgatgttttacatttagtttgttttgggtgagaaaatcgtatgattaaatagagcttcaggagacttcagggggccatgggtgcagccacctttccctaacctgtctgagacagaagatggccaggctgcccagacaaggcataataggaaccctggaaagaaagccagttcatgtggaaatagtacgtggaagtggtttttcggccaggggtggtggctcacgcctgtaatcccagcactttggaaggccaaggcaggaggatcgcttgaggccaggagttcaagaccagcctgggtagcatagtgagacctggaccctacaaagaaaaaaatgtaaaaataaagtgctctgtcgtttgccaaagaagaatggaaattaaattgccaaacttattatttaaaaatctcagtcctgcagctcttttgtgcaaagttggcaaatactaattattaaaccatctgttcatttacagaaacttttaaggtaattttggtcatatattgagattgatatttagaaaatcttgaatagaatttgctttacaggtatgttcattagtatccagtatttgtccacctaaggagccttattagacttttttttttttttgagacagagttttgctcttgttgcccaagctggagtgcagtggcacaatttcagctcactgcaacctctgcctcccaggttcaagcaattctcctgcctcagcctcctgagtagctgggattataggagtgcaccaccacgcccacctaattttttgtagttttagtataagagacagggtttcaccatgttggccaggctgatcttgaattcctgacctcaggtgatctgcctaactcggccttccaaagtgctgggattacaggtgtgaaccaccacacctggccaggaggcttcttagacattgttttcctaaactcctacccctaggtcatgaaatgtcaatttcactgatacactatctatgtgccatatccgtgctttatgtatcaaaagagtacgattttttttcaacctcccaagaagcagtttttccctcttggccaaatgtctccaagcactgttggtggccatattagaaacagaaagaattgttttttgtgtgttttgttttacattaagtgtattaataaaataggtatactttaacggagtatgttatatataattttctatataatggagctgtttctgttttactttttagcatccgagttgtagtagaatcgtttatgcagcttccctatagagcaaaaaaattcagcctgtactgcacaaagcctgtcacattacacattgacttctgccgagacagtactgacattgtgtaagtacagtttcttaagtccttcgaatcattagtaaaagccttctatcaagtgcacgatctttgtatgaagtcagttcctctgtagaagtgctgagcaggaggtctctgttcttcaggaggggcttctgagtcagtgtttgtctgacctggctgtggttgagggggtttggagcagggcctgagctctgtgcttcttgcctttgtttcaaacttacaaaaagtaataaattaactgtaaagaaaaatattcataaaacataggatcatggagtattatacatgtgtacacgcgcacgcgcgcacggtctcacccttttgcccgggctgtagtgcagttgcatgatcatggctcattgcagcttcaccctcctgggttccagcaatcctcctacctcagcctcccaaatagctgggactacaggcacatgccaccatacccagctaactcccctcccctcccctcccccactccctctccccaccgcccctccgctctcctcccctgctcccttcttgctttctttttttgagatagggtctcactatcttgcccaggctagtttcaaacttctgggcttaagcgatcctctcaccttggcctcccaaagtgctgggattccaggcatgaaccactgtgctgggcccatggagcattataaaagagtccattgcaattttctccaggcccacatctttcctcctgggaggcctctgtgatcttttccagctctgaacttgcaggcctttgtcagtgcttttacacacacttatctatgtggagcttttaacgaaaattagaacatactgtcctatttgcagaattaacttaagaatatgtgttgaggccaggcgcggtggcttacacctgtaattccagcactttgggaggccaaggcatgggaatcacctgaggtcaggagttcaagaccagcctgaccaacatggcaaaaccctgtctctactaaaaatacaaaattagcctggcgtggtggtaggcatctgtaatcccagctactcaggaggctgaggcaggagaattgcttgaacccgggaggcagaggtttcagtgagccgaaatcgcaccactgcactccagcctgggcaacaagagtgaaactccatctcaaaaaaaaaaaaaaaaaagtatgttgaaactctttgtcaacatacgtatctcttctttctacttttagtctttttcgtgggtggatgtgattgacatacttgctgtatttaatcattcccctctgtgtagccactaggttgtttccaaaccatttgcacagtacagtcccgtaagtatatggatgaatctgaccgggcctggtggctcatgcctgtaagcccagcactttgggaggctgaggcaggcggatcacttgaggtcaggagttcgagaccagcctggccaacatggtgaaacccatctctactaaaaacacaaaaattagccaggcgcagtggtacgcgcctgtaatcccagctactcgggagactgaggcaagagaatcgcttgaacccaggaggtggaggttgcagtgagccaagattgcgccactgcactccaacctgggtgacagagtgagactccgtctcaaaaaaaaaaaaaaaaaaaaaaaaacaaaagaatatagataaatctgtataaaatacacagacgtagaggcatatatatatacgtgtgccccgcaccccatctttgctccctttttctagtgtttgactgcatcgctagtgtttgtacaggacagatccctgccctgggcagttccctctcgggtgcgggcgccatgtctgctgtcttgaatgagcactaccgagtggcctgacttctgcctcctgtggtctgtagagacatcagccccatcctcccacccggtgctcctcctcttctcccttcccgggacgatggcattatggaaggaaaagccacagggagcagtccagttctgactccactggcatgccatgttgcactgtgtactctgaactcagaagctgccttcatgggctgtttggtgaccttcccattctccactcaccccagcccccacagtttccttgtggtggtgagtgcatcactcttgcggctggcgtggcatctacactgatgtgaggataagtccctgctgaggccaatgcgccctaccaggccgccctccagccagccccccccactactcaccgaaggctctgggagtgggatttgctgcacacagcagcccctgccccctgtactgccctctttcagagcggcccactgcccacccttcaggcatgattggggcccctgtgtgtgcaacccagctcccctcagaggcagttggtcctgtctttcttgaccttctctgcatgggctcttcccagaacaaatgtgggcttccgggcccttccccacccaacctaggatgcccccagggaagggcctactggggtttggtcaccttctttgacatctgatgcctttgtgtttgtgttttatgcagaacacccttttaacgtgtgtattacagttttacagattttgtcaaattccccttcaaaaagactagcaatttatactgccatcattggggtatggaaagcactgttattcccacacaatattgaatatcgttagactttctaatttctgcttgtttgctcagtaaaaatggtatttttatttttctgacttgcaaagctgtcacatgtattcatgtgattattgtgtatgtgtgaaagagggagagagagagaatggctgatgtggttattctgtgtgtgtgagagagagggagagactggctgatgtggttattctgtgtgtgacagagagtgggagagagactggctgatgtggttattctgtgtgtgtgtgagagagagagactggctgatgtcattctgtgtgtgtgtgtgtgtgtgtgtgagagagaaggagagagactggctgatgtggttattctgtgtgtgtgagagagagagtctggctgatgtggttattctgtgtgtgacagagagtgggagagagactggctgatgtggttattctgtgtgtgtgtgtgagagagagagagactggctgatgtggtcattctgtgtgtgtgtgtgtgtgagagagagaaggagagagactggctgatgtggttattctgtgtgtgtgagagagagagtctggctgatgtggttattctgtgtgtgacagagggggagagagactggctgatgtggttattctgtgtgagagagacggggagagagactggctgaagtggttattctgtgtgtgagagagacggggagactggctgatgtggttattctgtgtgtgagagagagagagagtctggctgatgtggttattctgtgtgtgtgagagagagagagtctggctgatgtggttattctgtgtgtgacagagggggagagagactggctgatgtggttattctgtgtgtgacagagagggggagagagactggctgatgtggttattctgtgtgtgacagagagggggagagagactggctgatgtggttattctgtgtgtgacagagagggggagagagactggctgatgtggttattctgtgtgtgacagagagggggagagagactggctgatgtggttattctgtgtgtgacagagacggggagagagactggctgatgtggttattctgtgtgtgtgagagagagagagtctggctgatgtggttattctgtgtgtgtgagagagagagtctggctgatgtggttattctgtgtgtgacagagggggagagagactggctgatgtggttattctgtgtgtgacagagagggggagagagactggctgatgtggttattctgtgtgtgagagagacggggagagagactggctgatgtggttattctgtgtgtgagagagacggggagagagactggctgatgtggttatcctgtgtgtgtgagagaaggagagagactggctgatgtggttattctgtgtgtgtgtgtgtgagagagagagagagagagggagagactggctgatgtggctattctgtgagagagagagagggggagagactggctgaggtggttattctgtgagagagaggaggggagagactggctgaggtggttattctgtgagagaggaggggagagactggctgaggtggttattctgtgtgtgtgagagagggagagtgactggctgatggggttattctgtgtgtgtgagagagggggagagagactgactcatgtggttattctgtgtgagagagggagagactggctgatttacttgttcatatgttagattgggttttctcttgggttgtttgccttttcattattagtaatctactacatttttcttttttaaaaaagctaattattaggtaattctttgtgtgtaacaaggttttagaaccactgcctttactgccttttagaaatcctttgtaattctcttgaattgtttaatatctttcttataagaataaaaataaccaacatttttgagtaatgattatgtccaggcactgggctaagtgttctatgtacattatctcatttgatctttaaaagaattcttggaggatggtggtggcatctctggtacataaaatcagaagaaacatagaacatcattctgacctgacattttatttttttccttgcttccaagtttctcctctttccccactgcctacagcttttcctacaattttctttgcaaagcataagaaagatgtagaaaggacaagatgacaggggtaaaatgggagccagtgagagggcgctagggtcagcagagtgaggaacagtagttttatagtagccgagacccagtgcgttagctcacgcctgtaatcccagcactttgggaggccaaggcaggagaatcacttgagcccaggagtttgagaccagcctgagcaacatagctagaccctctctctattaaaaaaaaaattttttttaatcgctgagtgtggtggggcacacctgtagtcctagctactcaggaggctgagatgagaggatcccttgagcccaggagttcaaggctgcaatgagctgtgttcatgccactgcactccagcctggataacagagagagaccctgtctcaaaaaaacaaaatgaaacaaagatagtatctggctctcccatgactgcctgtgagggtgtcggtgtaccagcatgtgtcgcgccctctctgtgccagactgtgttagacaccccacactcaggatccctgtcccaggagcttgtgttctggttgaggagactgatttgtctggggatggtggtggtgtgacagacagtgcagtggtgagcacaggttggtctcagtggggcctctgtgctatgagtctgcaccggtgcaggtgacagtgttgagacgagcgtgttgcaggatgcagtgggatcctcacccccagagcagggccagtgccaggtgccccatcatctgcatcacgtgttccatatgtagtgtgagaaatgtccagtgcatggtttacaaaatgctgttggtgtgctagcctcagatttttatgtaatggagttgcatctgttcactgttccagacctgccaagaagtgggacaatgcagctattcagtactttcagaaccttctgaaaggtaagccagtgcctgatcactgcagcctgcctggaagtgacacccacagaggcctcagcttctgctgctggcgggggttggagatgcccctgttggccaaacggccctcctcagaggagttccctaagctacctggggcttcctccagctcaagtgccacagtaactctgcacccctagtggcagtggatgtcagtaattgacagctgagatcagcagggggctgtttgtgcaggggaacccttacacagtaataatacctgcctcttcgtttgcataaaagctgcggcgctgcaaaataaattcatgtggattttattgtaccagcaattgatgaaaaacctagcatttttagtgagcaagagatagtaaatggatatttattgtgtaatattcattacttctaatttaagatgcataaaatgtcttcagctgttctttttattttatatcagtgactataaacagtgtcttttgtgggatctgtcttaacctctggcagtcagatacctggttttagtgatagggttggtggatgggaaacacctggggtgctgcctggtgcctcgttgggtcctggccccactcctgtgctgtgtcatcatctgggtagaggaggagccagaccctttgacctgggagcagtgggaggctgggaggtcactgtgactggagttttggcccctgtgagccatgggggctgctgggagatgagaatgcgggtctggaggaggccggccacttagtcctcagtggctcaggcaagtgacttagcctctgagcctggtctcctcacctgtgacatgaccactgtacttaaccttgaaggtagtggtaagaactcagcgaaagaaggtttctaaaggacttagcacagcacctggtaggtggcagtgatgctgctgctgcggggttttgagtctctaagggagtagccgggtgctgcactccgtggggctttgcagggtagaatggacctcagatgaaggcctgggactggaaatctgggtttgggaggcatggagaagagaggaccacagggtggcacaggaacctgttgacagggacaggacccataatccactccacaatcaggagtgccttttcctaacatgctccccctggtcctgcccgaggaagacatttgggcactcttaagtggttagcagaggttactaggtgggaaatcgtcatgattgtttcaaatatacttttaacatcagctgatttgtgttttcatttatgctatttagcaactacccaggtggaagccagattatgtgctgtggaagaagatacatttgaggtttacctttatgtaactataaaagatgaaaaagtaagtgaaagaattgtatttttataatatttcatcattttaaattttactttaataaaacagaataaatgccaagaaaaacactgtagttcgtacagcatagaaattgtcttaatctcttaaggtctatcttagacccgaagttagccaggtctgtgttttcttcttttgattactttaaaaaatgactttggcattttatttaaacatggtcaagaaattattcctatagtgatgagcatgaaatgttgttttcttctcagggaacatgatttttataaatatactaatttgctgtagcgttagttcactgcctttccccctagactttctcactgtatgtaacgtgcttgctgtaaataattcagatcacaagcagaaagaaagcggacatcatatgtgagtggcccctacctctgccaggtgccagctgctagcattttggcctctgccctttctgaaggatggctcagggcacacctcagcaccaggcagaggtggacagaaggggcacacatccagggctgctcagagcccatggagggtaccttaaccatggattttttaaaaattgtattttgaaatagacttacagaagagatgcagaaatagtgcagaaattttgggatatgctttgcccaggttgtcctgatgttaacatagcacaaaaccacagtacagtttttaaaaccagaaaagtaacattgataaaataccactgaaaacctgcaggcaggtgaatgttgacagtttcccggctgatttcctttttctgatgtaggatctgctccagcacctcccactgcgcctgtttgtcatgtctccttcccctcctctggcctgtgacagctcctcagtacttccatgcctctcatggcattgactgctttggaagagcagtggtcagtggttttgtagaatgttcctcaatttggtttgcctgatgttcctcatcattgtattaaggctatgcatttttggcaagaagcccacagaagtgatactgtgcccttctcagtgcatcccagcaggggtttatgacgtcagtatgtctaattactagtgatgtgaatggtttttttccttcagcttctaagtttggggtacctgtgcaggatgtgcaggtttgttacataggtaaacatgttccatggtagtttgctggccagatcatcccgtgacctaggtattaagcccaaaacccattagctattcttcctgatgctctccctcccccctccccaccccccgacaggccccagtgtgtgttgtttcccccagtgtccatgtgttctcatcatttagctgccacttataagcgagaacatgcagtgtttgtttttcagttcctgcattagtttgctgaggataatggcttctagcttcatccatgtccctgcaaaggacacaatcttgttcctttttatgactgcatggtattccatggtgtgtatgtaccacattttgtgatgtggatgttgatcacctggttaatgtggtgtttgccaggtttttcctgtacagagatgttagtttttccttctgaaattaataagtatcttgtgggggcctactttgaggctgcagatagccatttcatcaatgattcttggctgtgaaagatattactgtggtgtatacctgtttcatctttccctctacatttttctcctctcctctcctctcccttcccttcccctctccttccttcccctccctcccttcccctcccatccgtctctctctgtctcctaggttggagtacagcggcacaattgtagcttgctgcagcctcaacctcctgggctcaaaggatcctcccacctcaacttcacaagtagctgagactataggtgggcaccaccatgcccatgagttgcgatctcattatgttgcccaggctggtctcaacaggcagtcttctcgccttgtcctcccaaagtgctggtatcacaggtgtgagccaccacacccagcaccttctgcatttttaatttttattatttatttatttatttttttgagatggagtctcactctgttgcccaggctggagtgcagtggcgcaatctcagctcactgcaacctcttcttcccgggttcaagtgattctcctgcctcagcctcctgagcagctaggattacaggcaagcatcatcacacgcagctaatttttatatgttaagtagaaacggggttttaccaagttggccaagctggtctcggactcctgacctcaagtgatctgcctgtctcagcctcccaaagtgctgggattacaggcattagccatcacacccagcccccttcttcattttttctttttttagacagagtttcattcttgttgcccaggctggatctcaatggtgcgatcttggctcactgcaacctccgcctcccaggttcaagtgattcttctgcctcagccccctgagtagctgggataacaggtgcctgccaccacaccggctaattttttgtatttttagtagagatggggtttcaccatgttggccaggctggtttcaaactcctgaccttaggtgatccacccgtcttggcctcccaaagtgctgggattacaggcgtgagccaccgtgcctggcccccttctgcatttttaattggaattttataccaaagaaccctccctcctcccccatatattaattattcgataatttgtattagtatggacttttggaaatgtattttatttggggagttataatctataactatcattattgccttgctcacattaccttggattctggccattaggtgctccttcaaaggggcttttgtatactttcaatgtgccccatcattacttgaacactctttactctctgatgccacaatgtttatcattttgttatttgccagacctagccctagaatcagccacttcttccttttttttttttttttttttgagatggagtctcactctgtcgctcaggctggagtgcactggcgcgatctcggctcactgcaagctccacctcctgggttcatgccattctcctgcctcaacctcccgagtagctgggactacaggcacccgccaccacgcctggctaattttttgtatatttaatagagacggggtttcactgtgctagccaggatggtctcgatctcctgacctcgtgatcctcccaccttggcctcccaaagtgctgggattacaggcgtgagccaccgcgcccggccactggaatcagccacttcttcaagcagctctggttccttttattgaagaatgatatttaaatatctagatgagggcacttggtgtgcttgttccaactggggtgtcatgattgtaggtcctctcagcagaaaatattaggaaatatatgtatgtacttgctcccatgcacacacaaatctatatttctgtatccatctgtacacatattaagagctttgatatctctgatttgaatccagcaccatagggttcattcttaccctctcctttccttatttattcatttattttttggagacagggtcttgctatgttgttcaggctggccttgaactcctgggctcaagtgatcctccagcctcaccctctcaagtagttgggactataagcgcataccaccatgcctggcctcttattcttttttttttcctgaaacggagtcttgctgtcacccaggctggagtacactggcgcgatctctgctcactgcaagctccacctcctgggttcacaccattctcctgcctcagcctcctgagtagctgggactacaggtgcccgccatcacacctggctaattttttttttttttttttttgtatttttagtagagacagggtttcactgtgttagccaggatggtctcgatctcctgacttcgtgatccacctgtctcggcctcccaaagtgttgggattacaggtgtgagccaccacgcccggctggccccttattcttaatgcctttctccaccagtgagaaacctactctcgttggccgcagtctacgtatttgattcatccatgtattcacattaagtaatttcaggattgctaacccacactcctgtgaaaacaaaatttgtatttagtcttcacattatgcagccaaaatactgtttgccaaagttacttaggttgttttttctctttcgcaccttcttcagtgtgattatgttattcttttgtaatggggttcatttgttactgcttatattgcatgttgggttccctaaatgttcctcacatcctggttcattttacctatgacttttcattacttattttataacttagtaaaaataccaaaatcagccaaaggctgtgacttacacctgtttaatcccagcactttgggaggctgatgtgggtggattgcttgagctccggagtttgagaccatcctgggcaacatggtgaaaccttgtctctacaaaaaatacaaaaattagctaggtgtgatggcttgcacctgtagtcctagctacttgggaggctgaggtgggaggatcacttgtgcctgggaggcagagagccaagatcacaccactgcactccagtctgggtgacagagcaagaccctgtctcaaaaacaaacaaaaaaaaccgccaaaatattggctgcagaaccagtcgttttttttcatttttttaaacctgagagatctatcctgtaaggaccagtcttgtaaaatatctttttttcaaataaattctctataaacttgctttcttcttgcttttcaaaagtagatctctttctaaccatgtaggttgtatgttgataatgactctatcttttttttttttttttttttttttgagatggagtttcgctcttgttgcccaggctagagtgcaatggcgcaatcttggctcaccgcaacctctgcctcctgggttccagtaattatccagcctcagccttcccaagtagctgggattataggcatgcgccaccacgccgggctaattttgtatttttagtagagacggggtttctccatgttggtcttactttaaggtggtaaagtgcagaaggcagggaggttcgtgcttagctgagagagcttataatgcatgcatgagatcataactgccggaggaaaaaatgtgggccagcaatcctttaccagctcccaaaggtggcaacaggatgtgtcccaaggtgttttcttttttggtctggcttctttcatttggcaaaattattttaagatgcatccacgtttgttgttgttgccaagtcctcttccattgtgtggatatactacagtgtatttacccattaactcgttgatggatatttgggttgtggccataggccccttacagatatttatgtacaagtcttcctgtggatctgtgctttcatttctctcgagcattacctaggagtcaaacttttggatcatattgtaggtattaagaagctgccatattgttttccaaagtggtggactattttaccttcccatcagcaatgagagttctagttcctccatgtcacttgtgtaaacattcggctaagtgtgcagtagcacctcattgtggtttaaatttgcgtttccctaatgatggttttatatgcttatttgcaatcttcagactttgatgaagcagacattcagattgtttgcccatattttaattgtgttgatttcgttttattgagttttgagagttccttatatattctggatacatgtcatccggatacttgattttaaaagaattttgcctcatctgtttattctcttgaagaacagaaatttaaaattttgagcaaatccaatgtaacagtctttcctttgatggttcgtgttttgtctctgtcctcccaccaggcttttgcctggccaggtagttttagtgctacagtgcgtatgtccaagaagacatctcatgtgtttcacacagatgcttgctgtttttcctcatcaggattggtgggaagtatttggtttaccagagcaggagtcaaatctgtttctctcagattatgttctgtaaaataatttctctgaaggtagaactttggggttaagtttggaatatttcctttaaaatcgcttgactatatttgtcttattagtcatgaaatgtttaaaattttacaggtttgtgttaatgatgatcttgttgcaaagaactatgcttgttatatgtcacctacaaagaataaaaaccttgattatttagaaaaaccaagattgaatataaaatcagcaccctccttcaataaactcaatccagcacttacactctggccaatgtttttgcaaggaaaagatgttcaaggaatggaaggtgagtagattctcatcatatcaatttcccttacattgttttattaataatcttagtgtatagatataagttgtacagacttttccccacatggagacaaagacttggactctgtttaaagtttaatcctgatgaggctgtgacacattgtaaggtcttaaagtgttacagtttgtgtttatgagaccaggaaaaaaactgccctcgatttctgttttttttttgagacggagtctcggtctgtaacccaggctggagtgcagtggtgtgatctcggctcactgcaagctcctccccccaggttcacaccattctcctgcctcagcctcccgagtagctgggactacaggcacctgccaccatgcctggctaatttttttgtatttttagtagagacagggtttcaccatgtcagccaggatggtctcaatctcctgacctcatgatccgcctgtctcagcctcccaaagtgctgggattacaggcgtgacaccgcgcccggcctcaatttcttattaacattgagttatgttgttagaagtccaaatgtttgcaatttagagatactaagaaaacaaattttgaatatttagactttagacacctttaaaaaaaagagctatttatcacaaataacccttagcataaaaatataagagctagtcacggattgtggaaataatttccaatgtttctgtccacatccagtttttagtcccctcaccttgtgtcccctagtcaggtttcctgtaacctcagagcaaaagcaagagcagaagtaatgtactaacgagttcacatttttattttgggctttatttcatgctttaattctgaaatttattctttctatcagattcacatggtgtaaattttccggcacaatctctgcaacatacatggtgcaagggtattgtcggtgacctcaggccaacagccacagcacagggtgagttctgctaatgtggtttatttcataggcagcatgaaaaaaatattcttagctttttaaagattagaaaggttgtctagaaaggccatggtaattctttctcttttcttaatttaatgtaaccaatttgtgatgtagatcctgaaagagttcatgtgtcctgcatttcatacttagaaattttactgtcacgtaaagaacataacaggcaccagttcatgtgcaggactgatttattccagcctagccatcgaccagtaatcactgtctgtccctagagtgtacatatgtatttattattgatttttcacttaggcaacaggatgcataaaaatagggaagacatgcttatgagggcagaaatacgtagttttaaattccagtcttcaagatatttaatgaattggaattgctgggtgagggtgaaatttttcagcccctttgatgactggctcgccctctgtggtggttcctccaccatttccctcttatgctggatgtgtgtccaggaaggcctcacttcatgtcttggataggttcttggaaactgactttaagtgaaacaatgttataacgaaacaaccttgagcaaagcaacttaatttgaggggctgctgtactttgtttcccttaaatctgtggtttccaagaacctactgatgagtcaagtgaggacttactgatacctgtgggtgtaatatttcatgtgtatccatagtaaaccacaactacattaaagctttagccaactaaaatatttcctgtacttcagattattttcaattactttggtaatgttgcttatcatagagaaagaaagatacaaagggtttttctcagccactttgccaactagggtcctccatggctggcagtgcccaccccgtccccgacctgggcctcactcagccctgggcctggccgctggaggctccctacccactcagcccatctgtgctatagattgtatccgcatttggcagttcccaagctcttgtcctgtgtccaagaagaataaggttatgctgacagaagggtgaggatgggcagagaagaattttatggagcgatggaatagctctcagtgtaacctcattcttcttggatgggtggtttctctctcagtgtgtccgggctggcactttttatggactcagaatggggagtgcctgctgattggttagtgagtatgcaaaaaaggttaaagcaaacacaccactcaaaggtgggtatagcagtgtagaaaaccaactaggaaagggtaggtgcatatgaaataagtgaaaggtagacatcaatcagaggaaaaaatgccaaacggaaagacagtttctcaatccagtctgtgtattacccgagacttgtagctaggctttaaactggtttctgcttgaaaattggttttcaccagggacccaccccatctcgctaggcatttgactgccttttgctgctatcaatagcccagattgtaaaaacctgtcatctcactaactgctttttaaaattgtagagtcagggccaggtgcagtggctcacacctgtaatcccagcaccttgggaggtcaaggctggcagatcacttgatgctggcagttcaagaccagcctggccaatatggtgaaaccccgtctctgctaaaactacaaaaattagctggatgtggttgcacatgcctgtagtcccagctactcgggaggctgaggcaggagaattgcttgaactgggaggtggaggttgcagtgagccaagattatgtcattgcactccagcctggatgacagagtgagactctgtctcagaaaacaaaataaaataaaattgtaggctgggcacggtggctcatgcctgtaatcctagcactttgggagaccgacacaggtggatcacctgagatcaggagtttgagaccagcctggccaacatggtgaaaccccgtctctactaaaaatacaaaaattagccaggcatggtggcgtgtgcctgtagtcccagctactcaagaacttatttgctgcatgatgaaatgagaaactaggatgtaaaaaggaggagtgaaccctgtagactcttttgcattgaaggtaagggtggcaacacagtgtagagagaacaggctcggggctagaagccaggagacatgtgttctaatcctgggtctaccactggcttggtgggagcctcgaccttccaagagcctgcaactgcccatatgtacacggaggggaggtaggggtagactagaaggcccctggagttctagcatgtctcagtctgggaattttttttttttttgagacggggtcttgctcggttgcccaggcttgattgcagtagtgtgatcacagctcactgcagcctcaacctcctggcctcaaaggaggctgcggcaggagaatcacttgaacccaggaggcagaggtttcagtgaaccaagattgtgccactgcactccagcctgggcgagtgagactccggctgaaaaataaacacaataaaataaaatattatagagcctttctttccaaagttttccagacggtatttataaaatttttatttcacagaaatggggtcctactatacatacctctttgtaatgtattttacttagtatatggctgaattccctttctaggtcaaatatatccggtataatgtgtttaaggacataaactctgatgtgagactgccagggtgtcaggccgcttccttctctgggacatgggatgtcatccccatccccctgggagttactgaatgggccatcgtgcagcgtgcttggctcagcgcctggcctgtggcagcctcagcgcatgtggcccctgccccagattctgatatgcctcttgtagggggtccccaggtgagaattacagcagaaggtagcacctgttgttgatgggcatgtattctttccatttatattctttttccattggaggaataaaaataccaggcactacatcatcgtgtttaattattgcgtggctttccattgcttgatatgtcaaaattattttcaggagtcccagcttgctgggcagaaattgtttcctgcttattacaatcagtactggaatgaactatgcttatctttgaaaaggaaaaggttatggtgaacaataacaaaaaagataatgtgaggtgtaactgaattggcatgtaaaaagcagaattattagatgttacttttctaagtatagatttccctttcctttaattattgtgagaaggtacttcagttatatttcagttagtttttggtgtttctctttgaagttgcctaatatttttgagaatcaaagtataatacttggctaatacttgatttgctaatacttgattaaacaatcacatattacagaagggctacagtgaaaaataatttttttatttgcaacctcttcttaccccaggatgtcccctagagataaactcactttttaaagttgtttattttggtattatctccagattttaaaataattgtgtatattttactattactaggcttcttcactttagacattgtcttgatttctagggagattcactctcgtgcccctaacccacattcattcattcatcagatatttatgacgccctcactgtcaggtgcttttctagggattcttaggagggaaacaaagtctgtgcttccatagagtttacatccatcttctcaataaattttttattttacaataatcacaaacttacagaaaagttggagagtattacaaagaacttttttcccaaaccatttgagaataagttgctaacctgattccccaatacttgagtttttcctagaaagaaggacattctcaaaaatatccacaatgcaatcatcagagtgtgaagattaacactgatatattgtgatcatataactcccaggcaccattcaggttttgctggttatcaaagagacgtcgttcagcatcacttgttgcatttagagaagacgtttcttgtttttgttttgtttagtttttgagacggagtctcactctgtctcccaggctggagtgcagtggcacatctcagctcactgcaagctccacctcccaggttcacactattctcctgcctcagcctcccaagtagctgggactacaggcgcccgccaccaagcccagctaattttttatttttttattttttgtatttttagtagagacggggtttcaccgtgttagccaggatggtctcgatctcctgacctcgtgatccgcccgcctcggcctcccaaagtgctgggattacaggcatgagctactgcgcctggccgagaacacatttctttagtctttcctctggaacatttcctgggtctccttgattttcatgaccttgcactttggaagattacagacctattattttgtagaatgtgttctggattttggtcattctaataggggtgtagtggaatatcattattttaatttgcatttctctaatgacgtaggatgtgagcatcttttcatatgcttatttgctgttggtatatcttctcagatgagatatctcttcaggagttccttatttatttatttatttatttagagatggagtcttgtgctgtcacctaggctggagtgcagtggtgtgatctcagctcatggcaacctctgcctcccaggttcaagcctcctgcctgagccccgcgagtagctgggattacaggtgcccgccaccatgcctggctaatttttgtatttttagtagagacggggtttcaccatgttggccaggctggtcttgaactcatgagctcaagtgatccacccacctcaaatgatccgactgcctcggcctcccaaagtgcggggattacaggcatgagccacccaccatgtccggcaaggatttggctattttaaattgacttttttgtcctcttagtgttgagttttaggagtcctttgtacattttggataacaatcctttttttacatgtgtcctttgcaaacatttcctcctagtgtgtggcttgtctctcattctcttgacaatatctttcacagagcagaaatgtttagttttaatgaagtccagctgatcagttgcttctttcatggattgtgcctttggtgttgtctctaaaaagccattgccatactcagggtcatctaggttttctcctatgttattttctaggagttttgtattttgcatttttcatttagatccatttgagttgatttttgtgaagggtgtaaggtctgtgcctagagtcacttttctgcatgtggatgttgagttgttccagcaccatttgttgaaaagagaaggttgggagttttattagagaaatcttacatattgttttgaaaggaagctcattgacgctagagaagtttttgggagctggcaagctctgattggtaggtaatggcggtaggaaaaactagtcttaaagtcatggcaggttatttcagtagctaccaggtaaaactggtgttgggattctagcagtgcacctcaacagcggggccaagaaggtgctctgtgcctcgagtacttttcctctggcccctcgactctgatttagttggagatgaaagaatgacctagtttgtataattaactttcacaggaccattgggtttaaagtgattatttatatacagtcatgtgttgcttactgatggactatgttctgagaaacacgtcattaggtgattttggtgtgcaaacatcatagggtgtacttacccaacctacatggtgcagcctactacacatataggcaatatggtatagcctatggctcctaggccacaaacctgtacagtatgttactgtattgaatgctgtaggcagctgtaacacaatggtaactatttgtgttatctaaaccaatttaaacgtagaaaagatagtgattatgctatgatgttgctaggcaataggaatttttcatcttcattaaaatcttatgagaccaccatcgtatatgtggtctattgctgatggaaggttggcatacggcacgtgactggagttggattactgtctgccatgtttattactgtatttgatttattgcccttgtttttttgttcctcttttgactttgctctttttctaccatttgtgattttaattgggcattttgataccatataaatggtaggaggggtggagagagggaaataaatgtctagagccctgtaattagagtcagtcttctagggagcctgtacctttgggctgcacgcttctcaggtgcccctcagcatccctcacctctcaccttatgtgggacaggatggctggaagggactgagttgtgttattttcctcccccaccagaaggttaaatcgggctgtatttcccttcctctaggttagataggttctgataaactccagtagtttaggctctggttcaatagtttctcctgaggtcaggcccttttgggaaggaacagcacgccctttatatttccaagtagttacttttcccctcttcctgtcgaagcacgagattttcctgtggtattcactgtgagaacctgctagagctccaggaggcagaactcacagaagtgtggcacccagcccctgaccccggagttttaactaacggaggtgtccgtgccgaccctccagcaaattgtcagtttacagttcaggtttccctcctcactcctggtcccatagaagtttattctgggtttctgcccctgtccattctgagtctctctgtccatctgtcagtctctccagtgctggggcaacagtttgccctgtgacctcactttgatggacctaggaagaattcctgatttttcagtgtgttcagctttttacttgttgttaagatagagtgataaccatcaagctttttacatgctcgactggaaactggaaattacactaaattttaaagtgtaagattgacaaatcttggagattctaattgcttttctttttttacttgtattgtccatctttttttttttttttttttttttttgagatggagtctcaccctgttgcccaggctggagtgcagtggcacaatctcagcttactgcaagctccgcctcccaggttcacaccattctcctgcctcagcctcctgagcagctgggactacaggcgcctgccaccacacctggctaattttttgtatttttagcagagatggggtttcaccgtgttagccaggatggtctagatcccctgacttcgtgatctgcccacctcagcctcctaaagtgctgggattataggcgtgagccaccatgcctggctatattgtccatcttcattgactccttaagttgttccagattctcatttatggaaccctatatctgtgtgatttgaatcttttaatatctattgagactcctattatgattcaggtatgatctctcttggaaaatattctgtgtccaccttagaaaaataggtgctttgctgttgttggttagaatgttatagaaatcttaattaggtcatactggttgatagcattgttcaaatcttctttatctttattgattttccattaactgttctggcaattattgagaaagaggttttgaaatagccaactataattgtcttgttttctctttccagttctgtcagtttttccttcatgtattttgaaggtctgttacttaggtgcataaaggcttagaatttttatgtcctctaggcatgggcaaggacttcatgtctaaaacaccaaaagcaatggcaacaaaagccaaaattgacaaatgggatctaattaaactaaagagcttctgcacagcaaaagaaactaccatcagagtgaacaggcaacctacagaatgggagaaaatttttgcaatctactcatctgacaaagggctaatatccagaatctacaatgaactcaaacaaatttacaagaaaaaaacaaacaaccccatcagcaagtgggcaaaggatatgaacagacacttctcaaaagaagacatttatgcagccaaaagacacatgaaaaaatgctcatcattgctggccatcagagaaatgcaaatcaaaaccacaatgagataccatctcacaccagttagaatggcagtcattaaaaagtcaggaaataacaggtgctggagaggatgtggagaaataggaacacttttacactgttggtgggactgtaaactagttcaaccattgtggaagtcagtgtggcgattccccagggatctagaactagaaataccatttgacccagccatcccattactgggtatatacccaaaggattataagtcatactgctataaagacacatgcacacatatgtttattgcggcactattcacaatagcaaatacttggaaccaacccaaatgtccaaaaatgatagactggattaagaaaatgtggcacatatacaccatggaatactacgcagccataaaaaggatgagttcaggtgctttgtagggacatggatgaagctggaaaccatcattctcagcaaactatcgcaaggacaaaaaaccaaacaccacatgttctcactcataggtgggaagtgaacaatgggaacacttggacacaggaaggggaacatcacacaccgggggcctgttgtggggtgggggtcggggggagggataacattaggagatatacctaatgttaaatgacaagttaatgggtgcagcacaccaacatggcacatgtatacatatgtaacaaacctgcacattgtgcacatgtaccctaaaacttaaagtataatttaaaaaaaaaaaacagagcagctgaaaaaaaaaagaatgtttatgtcctcatgatgaattgattcctcagtcattgttaaatggctctctttatcccagatagtattctttgctctgaaatctaccttaatattaatatagcttatctagatttattttggttaatattagcatagtatatctttttatgtccttttagttttaacctatttgtgcctttatatttgaaggggagttcttgtagggagcatatagttgtgtccaatctgtcaatctctgtcttttaattggagtatttaaatcatttctatttagtgctatttatttaaaattttttgtcatttaaaatttttgtgggcacatagtaggtatgtatatttatggggtacatgagatattttgatacagatatgcaatgtgaaataagcacatcatggagaatgggatattcattctctgaagctttattgtttgcattacaaacaatccagttacatctttaagttatttaagacttacagtcaccctgttgtgctatcacgtagtaggtcttactctttctgatataatgtaatgtattgatattgttggctcttaatctagcatcttgctgttagttttctgtttgtctcatctggtttttgttccctttaccctatttttttgctttcttttggattaagcaccttttgtgttccattttaattcctttgttagcttattagccataatttttttttttgagacagagtctcgctctgtcattcaggctggagcgcggtggtgcaatcttggctcactacaccctctgcctcctgggttctagtgattctcctgccttagcctcccgagtagctgggactacaagcatgcaccaccacgcccggctagtttttgtatttttagtagagacggggtttcactatgttggccaggctggtctcgaactcctgaccttaagtgatccgctggcctcagcctcccaaagtgctgggattacaggcacgagccaccatgcctggtcagctgtaattttttgttttgtatgtttagtggttgctttagggtttagagtaaacatctttacttctcatagtctaccttcaagcagtattacgcacttcatggatagcatgaggaacttaacagcagtctccttccatttcctccctcctggcctttgtgcaagtgttttcatgcattttatttatttatttatttatttatttatttatttatttatttatttatttttgagacggagttttgctcttattgcccaggctgtagtgcagtggcgccatctcagctcactgcagcctccacgtcctgggttcaagcgattctcctgcctcagcctcctgagtagctgggattacaggtgtgcaccactatgcccggctaatttttgtatttttagtagagatggggtttcatcatgttggtcaggctggtctggaactcctgacctcagatgatccacccgactcggcctcccaaagtgctgggattacaggcatgagccactgtgcccagactgttgtcatgcattttaattctacatatattagaaaccccacaataattcatcattttttattaagtagtcaattctttctttttttgaaagaagaaagaagttgaattttctaacatgtcataagcgtgcaggcaggtcatcagagtctgtgctgtttctgtcttgttggccttgccatcctgaaggttttgccgccatcctcctattcaatttatttatcactgtatctcccttccagctagctggggggcagggagaagaggtgaagggggtacaactcagaggttgcacatggtgctttctctctcatttctttggccagaatgttcttgtgcagccatgcttaatgggagatgaaggtctgggagaggttgtcctccttttggattgccaggctcccactaaaaatcaggggttctgttacctcagagttagaaaactgcagccatgggccaaatctggtctaccacctatttttgtgctacctgtaagctaaaaatgatttttccatttttaaatagttgaaaaaatccagagagaaagaatattttgtgacacattaaaattatatgaaattgaaatctcagtagttacaaataaagttttactgaacatagctggactcattttcttacatattgtatacagctgcttttgcactgtcagagctgagttgagtggccgcgccccaggccacctgtcccacaatcccacaaagcctgcagtatttaccagctggtgctttgcagaaggagtttgctgaccctgatctggagcaaggactgaatgatattccaggataactaacagaccctgccacactccccagcacagagacttcagattttgtgtgtccctgtaaattttaattctcttttaaagagatttttaagataagaatatatgtttttatatttcccttcatatttatcatttctggtggtggtctttattctttttttttttttttcttttcagagacagggtgttgcactgttgcccaagctggagtgcagtggtgtgatcatgactcactgaagcctcaaacacctcagcctcccgagttgcagggactaggctcacaccaccatgcctggctaattttcaaattttatttagagacaggttttcattatgttggtcaagctggtctcaaactcctgacctcaggtaatcttgcccgcctcggccttccaaagtgctgagattacaggtgtgagccactgcacgctgagacctttctttggcttactttgcttggatggagcacatccataccctaagggcagggtatgggagctgtttctcagctcttgagccctgttactctcattgcaatggcagaggtggctttctggattgcagatcaatttcctcattacttatgacactgcacatattttcatgttccttttggcaattcgtctgttctcctttgtgaaattcctgtttacgtgttttcttataataagctttgagagtttttattttttatggagacagagtctccatatgctggccaggctggtctcaaactcctggcctcaagcagtcctcctgcttcagcctcccgaagtgctgggattataggtgcaagccactgtgcctggctgagtttttaaaatatattctggagacgtcatttgtattatagatagatttccttctagtctgtggcttttcattttcttaatggtatttttcagaggagaagtttttgatttttggtaaagtctagctaatcctttttcttttaggattttatgtcctatttaagaaatctttgctttctctatattttctacttttggcttttacatttaattctaggatccatctcaagttagtgatgtgaggtaagggtcaggatttggttttgttttttccatgtgggcatccagttgttccactacatattattttgtatttgtggagctgcatcttcaaggtgggttcctggaagaagggtttctggtcaaagaatggttttatctctgttgccaggtgctgtgggtcctgtatcatctgggagtctcatgggaatctaggagactgcctgtttgcccatagcctcaccagcagagtttcaagtttttggatctttttcagtttgcagtgagaaatagtatcttagatgagtttgcatttgcatttctcttattatgagtgccacttatgattctttaagaagtcacatacattaattgtgatttttttttttttgagacagagttttgctctcattgcccaggctagagtgcaatggcacgatctcagctcaccacaacctccgcctcctggattcaagtgattctcctgcctcagcctcctgagcagctgggattacaggcatgcgccaccacacctggctaattttgtatttttagtagagacggggtttgtccatgttgatcaggctggtctcgaactcccgacctcaggtgatccacccgcctcagcctcccaaagtgttgggattataggcatgagccactgtgcccagccttgttgtgatttaatatatatttggacgtcttttcatcatctcattttgtgggtatgtgttctttttttttttttaagacagagtctcgctctgtcacccaggctggagtgcagtggctcactgcaggcagtgagatcatggctgactgcagcctctgcctcccaactttaagcaattctcccacctcagcctcccaagtagctgggattaaaggcacgcaccaccatgcccagctaatttttgtatttttagtagagacagggtttcaccatgttggctgggctggtcttgaactcctgacctcaagtgatccacctgccttgggctcccaaagtgttgggattacaggcgtgaaccaccactcctggcctctttttgtgttttctattgaccgtaattttcctttctattttctttattattttctgcctcctcttgaattgaccattttccccctcttccttttttactcttatatatattgtatttcatttctctgagccttaaattttatatatagctatactttctaatgaagtttcaaggtcatcattgtctgtcctcacatcaagaacgtcacattttcttttctaaactcctcttttcatttctgttctgttttctaaaattttaatttaacttgttttgtaaatgcattttgcactcagtttttctttcaagttctttggagtggaattgcttgggttcgaatcccagatctgttctttattagctgaaataaacatgggcaagttatttcacctttctgtgcttgcttttcctaatctgaaaagggggaaataattgtgcccgtagagaaatcacatggaattcaataacgcacatggtacctatcacatagaattgaatcagttaattcatataaagcatttagaatagttcttgatataagtactaagtagatgttgattatataattaatattattgtactactggtttatttttctcattccccaaatatatacttcgtagttctttaagtagggaggtgtctttgttcacgttgctgtaaaggaatacctgagacaataatttagcaagaaaagaggtttatttggctcacagttgtgcaagctgtataagaagcatagagctggcatctgcttatggtgaggcctcaggaagcttccaatcatggcagaaggggaacaggagctgcatgtcacctgtcaagagaggaagagagaaagtggagggagtgctaggctatttatttatttagattttttgagatggagtcacactctgtcacccaggctggagtgcagtggcacagtctcagttcactgcaacctccacttcccaggttcaagtgattctcctgcctcagcctcccaagtagctgggactacaggtgtgcgtcaccacgcctagataactttcatatccaggatttcaccatgttcagcaggctggtcttgaactcctgacctcaagtgatccacccacctcagcctccctaagtgcagggtttacaggcatgctgttgcacttggcctgtttggtttcataaatactattacttcttttatttcttggatattttaattcagtttatttgaaagtccttttcagacagatgttttatcttcatatcgtcagatgtggatatttctctcccaatctccttttttttttttttaactctttatgatggcattgaactactttgcggacttagtgatttttgtttgagagcttatcttgcatgaacatttctctcttggcgaattttaactaccacctccactcctggttccagagtttatctttttggctaaaaggttaattacctgataatgtaattccaaaccagaagaccacgtgacatgcagacttgggttccaaattactttaaagaagggttagggcattttataatatttcacatttctagtgctgctgcttatttcaatgagttatttaataggtgaaaggcgtatcttgtcatttcaatttgtgttccttttattaatagtaggacacttttctagaattgcctctgtgtttccctcataaatgattgccgggtaaaacaacagccattttataatgctcatgggttctgtggtcaggaattcggaatgggcatggcaggagggtttgcctttattccacactgtccagggcctcagacagggagacgtgagggctggcattaactaagtgggggcagtgatctgaggactcaggcacgttctggcagttgatgctggcttttggctgggacctcagctgggactcttgtccgaaatgtcctggtatcctttccatgtggctgcttccccacagcgtcatggctgggcttcaaatgtgagcgtccaagaccacagatcctgagtatgtggccttttcgtaatgtcactttagaagtctcacagcaccacttctgggtgggttatgagcccacccaggttcacaggaaaggatcatagagcccacctcttggcaggaggcagagtcgcattgtaagaagagcctgtgtgttgggagatgttgccatggtcttctgagggaaatgtcatctgacaagttgggaaaatactattgtgttccgttattagctggtatgggaatttttagaacattttaattgtttttacaataaaggttgagacaagattttaaaatttaatcccctcgagtaaggtttactacaaattcatattccataaaaatttaacatattaagattttataatggtatttgcttttattatattcctttttatcctattttctattaatatcactttttggtgtagcttttttattaccatttttattttgcagacaaagctgtaaaatgtaatatggattcattgagagattcacctaaagacaaatctgaaaagaaacaccattgcatctctttaaaagatacaaataaggttgtattttaaaaatgttctttaaatacaaagttcatatagtgttaattttcaaattttctcttttgaaatctatctgaaaccaaaaatatgttttctattaaaaaatcattggccatgatagtttccttcatgagaaaatatagtttgcttgtttgcttattttgaaaggagaaagtagctccagcttcttcatgtcgagctcttgttctcggcctagttttctttctacaaaattggatattgatcctccttttaatgaaggtgtgaaaatctgggattccagggcattgtcctagtgaagtgcaagtctaatctgctctccgtccctttgacaagacaggttgaaagtaattgcaggacattttaagtactgacgatctggaatgccagctgcctgccatttggacatttaatgtagtggttatagcgctggcataatcacccaactttccagttttttatctctctatctctgtgtgtgcatgaaagatgtctgggatggttgttcatgagaataactcccatggaattttggttccaaaagaatgtatattatgttgctagcatacacattctttctgaagaaaagttttcttttacagcgtgttgaatcctcagtgtactggccagcaaaaagaggcataaccatatatgctgatccagatgtaccagaagcaaggtatgatttgaaaattcaaactgggtgtggtggcgcctgcctgtagtcccagctactggggaggctgagctggggggatcgcttaagcccaggaggtcgaggcttcagtgagctatgatcgtaccactgtactccagcctgggtgacagagtgagactcttatctctaaaataataataataataattcggtgtaattgacaagagacttaagagtgatgttgtcttatacagtgttctataagattgatgattggaaaatagtccattttcaaagagtggcccaggaaattttggttaaacatattaacttaaaggaaaaatgtgacacctggttggcagcaaagttgactgaaaactggtagtggccctagagtctgtctcctctttgcctttttggacagagttgtccctgtaaggcaggtctgaagattggcacagagtggtcctgatgagagggatggcctcacgtggccagatggcagcacagggtgggtggttacccagggcggaaagagaagaatggtttcgtgagtatcagaggctgggtctgtactttgtcctcttcaagatacatgtcagtgacgttaacaaaattgcagaaaggatgtaatgttgtaccacttcttgaatggtctaagaacacacttcccctcgtgtcgtggactttatgctgtggttgtcatatgttgtacttttacatatatcataaatgctagactctatctcacttttatttaaatagtcaattatattctagagagagttaactaacaaaaatatcttctctctttacctgtgtggttgcattggtgttctttactttttgtgtagctccatatttccatctggtattattttccttccacctaagggcttcctttaatatttcttgcattgcaggtctgctgttgatgaactctttcagcttttttttttttaaaagtattcattttaggttcattttgaaaaggatacctttgctaggtgtagaattctaggttgacagcactttatttaaagatgttgtcccactgtcttctctcttgcattgttcccagcactgcctctgctgtcaccagtgcctttgttcctctgctgtttcctctgactgcttttcagattttcttttgattactggttttagcaatttaattatgatatactggccaggcatggtggctcacgcctgtattcctagcactttgggaggccaaggtgggcagacctcacccgaggtcaggagttcaagaccagcctggccaacatggtgaaaccccatctctactgaaaataaaaaaaagttagctgggcgtggtggcaggtgcctgtaatctcagctactcgggaggcagaggcatgataattgcttgaacccaggaggcggggtttgcagtgagctgagatcacaccactgcactccagcctgggcaacagaacaagactccgtttcaaaaaaaaaaaaatcataatataccttgctgtcgttgctaccatatttcttatgcttggggttcattaatgttctttgtttgtagctttcttacatcaaatagtcattatgtctacaaatatttttttctgcaccaatctttttcctctccttttagagactctgatgaaacaaatgtcagatattttgatattgtccaaaaagtccctgaggctctgttcattttttcagcctttcaatcttgctattctgcagatcaatgattctactgatctgtctgtacattcattatcttctgtcatccacattctgctattgagcccatcctgtgagtattctatttattatatctatatttttttgcgacaggatcttgctctgttactcaggctctcaagtgcagtggagcaatcataactcactatagccttaaactcctgggcttaagcgatcctccggccccagcctcccaagtggctaggactgcaggcatacaccaccacagctggctaacattttaatttttttgcagagatggaagtctcgctatgttgccctggctggtctccaactcctgagaccaagtgatcctcccgccttggcttaccaaaatattaggattacaggtgtgagccactgtgcccggcctatatttcttgtttctaaaattttccttgtttttttttttcaaaagtttatatttctttgctgagaacttgtgtgtttccacttgggagtgctggccttttcttcttgtggagtgagtgtccagagattgccaccctgagccaccagaggttggcacctgctgattgtcgtttcccttggcagtcgatctggttttcctgggcccgtgtgtgctgagtaactttggactcactctggatattttgaatgttatgttgcgagattctggtttctgttaacattctctagagagtgttggttggtgtcatttgtcttagcaggaggtcggtacctccatgaggtccggccctcatgttctgccttgcgaactgtgggtggcggtggccgtgtgagctcaggctctgggccctcgatgctgcctggggcctgttctgcatctgcttagcttggggcgagttggggcttgtgttgggtcatgaaccacctctctttcttttcagaatttccctcacagttaccaatttctagggcctccttccccgtattcctctggccagatagtttctcttggagacattggtgtgcagtaatgtggaattgggataccttgagaataaaacaagtaagggagaaaaaaggtggagattttcctcacgcagtctttggaccacagctcccatctcccagttcctctggcttcaggtgcaggttttctctcagggtttaaggtcaccacactgctgttgctgttgctgggtgcagccccaagatcagagctggccttggggcccggtgaggaaagaaaagaaaaacaatggggattccccacactttctggtttaaagggcgcctcttcccgcttctctggcttgaaggaagaagtctctcctggagattctggcgtctgcacctgccacaaagtcatcttgaggtcaacacagagacacagagagaaaaaagacaagaaagtcctggtgattctgtttttcaagtgtttgacttctctcccctgctgttggggcctcatccagaatctctagttgtgatcagcaggagagagaggctgtggcaggcctactccatcctgtccagcaccaccaccagaagtgtcagaaatgacttttatacttaaaggactaagctccagttctcacagaaatgtgcttatgtagataaaccaattcctcagtggtgcttcttaaatttttaatccagaaaataaagatattttcaggattggggtaaaggggttcacaatttttcatttttttaagagacagggtcttgctcttgttgcccaggctggagtgcggtggcacaatcacagctcactgcagtgtccaactcttgagcttaggcgatcctcccaccttggcctcccgagttgctgggactataggtgcacaccaccatgcccggcattttttatttttttatttttgtcgagatggggactcactgtgttgcccaggctgctgttcacaaattttaatgaatttttttttttcatttctagtgctttaagtcagaagtcaaatgagaaacctcttagattgactgagaagaaagaatatgatgagaagaatagctgtgtgaagtaagaattttttccttggcctgaattgtgtattgaaataattataataaaattataaacaagagaaatctacacattttattattaatttcaaacctgcattcccatcaaaaaataaatgtacagtatatctcctgtagggtttgaggttaatttttgcttttccatccacttgggcacatttttctgtttaaagctttgttccagtgtaagtagtcattttctaccttgccttctggattctcttggtgaagtgaacagtgtcacaaatcaaattagatacagttgatcttttggggctgttgatgttctttgggttggtctttgctttctttccagttctctgaggcaacactgctagagaaactgagcagtttgccttgatttcatacttgtgtaatctgtaaaatatttacatagcaattttcgttttgagacaaggtcttcctctgtcatttaggctggagtgcagtggtgcagtcacagctcactgcagcttcgacctcctaggctcaagcgatcctcccacctcagcctcccaagtagctgggaccataggcatgcaccaccataactgatttacatatatatatatatatatatatatatatatatatatatatatatattttttttttttttttttttttttttttttttttgtaggacgagggtctcgctatgttacccaggctggtctcaaagtcctggcctcaaatgattctcctacctctgcctttcagagtgctgggattgcaggcatgaccacagcttccagcctcatgccatttttatactttttaccatattggcctcaacagttttacattccaagtaactgtagctgccctggagctcccagagtgacaaagtgtgagacaggtcagaggtggggaggtcctgctgtttccactggttggccttgggggttggagccagggtgtggactctgcagccatgtgggcttcccagcttcccagaggccatgctgatgacctgccagggcttcttaccccacaggacaccacccaggatttcaagggtgaggctttgaaagcttccacgagcccacagagttggggatggctgttgatgcacctaactgacacccccctcccagggcaacctcagccctaatacccaaaggttttgctgtcacagtcgttattttccttggaacagaaggccatacagcttatttctttcttttattattttcaattataacctggcaaattaaccctggaatattctttttttcattatttatttatttattttttaattggagacggaatcttgctctgtcacccaggatagagtgcaatgacatgatcttggctcactgcaacctccacctcctgggttcaagcaattctcctgcctcagcctcctgagtagctggaattacaggcgcctgccaccacgtccagctaatttttgtatttttagtagagatggggttttgccatgttggccaggctggtctcgaactcatgacctcaggtgatccgcccaccttggcttcccaaagtgctaggattacaggagtgagccactgtgcccggatgaccctggaacattctattcccttttattttcgtattaaaaagttctgtcttgtctcctgttctgttaaaatgccctttacttagaacccactgattaaacaacatcagttatcctgtcagtctcctgtgggtttcagggaactttgaggtaattcaggattaaacatcaaagaaggctttgagttccttagggacacagggatgacctggtgatcctgggaccctcccccttgactgcgcagaggtccagcattggctgcactgcgtccaaagcctggggaaccctgtgctgtcatttctggcgagatagccaaggcagcctggaggagaggcaccctttccttaaggatggccagtcagagacccgcattgccgcatccccaaacctcacttgggactatgataacgactgtcacaatgtgggcagaggggcacagggaccttggctcattgccaggggccaggtgtcccactagcctcctctgtgtgacacctgtggttttcttttcctgtctttttgtctcgctgatggagttgctcaagcctgtaagtaccagtaagcggttgtatttctttctcctcgggcctgttccttcatataactcatttggaaacccccaagttacagtacattctggaagaggtcaccccagatgcagtctttcccattccaggatcacataccaccaggatccccttgggaatcctggatacttgggtagcagaggaagtggcggggcccacacccaggtttaagggctctcctagtgaaattctctctcttaatttttgggtgttcaagagaaactgctctgttttgctaagggcttctggaggtggcaaggcagcctggattgggctgagatcgtgtttctaagctggtgccagcttccgcccagcccgtggaaatatgctaggtggtgggtgagtctcaactctgtgtgttgaccctcgcagcattattttcaggaggcttttggactttgacaatgcagccatatgtgctgcggggagtactttcataactggttaagatgtcctgagcataggagggtggagtggtacctgcttgccactcacgtcatctctgatatttaatgtaccctggagctctctctgcagttctttgtctttccttcttctgtgtccctcttgcctactgtgatattcattctttattcttctgttgtcttcctttaaacattttaacatcagcctactttgtactgcccactgattgaagatggaaaattctccgaatatgcccattctttttttcttttctttttttttttttttttgagacagagtctcgctctgtagcccaggcttgagtgcagcggtacaatctcgccttgctgcaacctccgcctctcgggttcaagcgattctcctgcctcagcctcccgagtagctgggattacaggcgcatgccaccatgcccagctaacttttttgtatttttaatagagacggggtttcgccatgatggccaggctggtctcgaactcctgacctcaggtgatctgcctgccattagcttcccaaagtgctgggattacaggcatgagccactgcacctggcccaaatatgcacattctttgtgataccatttcaatgtcagagtctgaacagcaatgcatgtcgaagcctggactgaaatgcccttcacacaaactgctgagtccagggtcagacactgtccttccagacccgagccctctgccaaagaacacagtgagtggtgagaacgcagctctgttgtacaacccttcctcctccctcttgaaatcacacccacacgtctgttcttcccatgactccactctccccacgtcatgattctggtgagatgagtgttcattgtccctgggctgtgagcaggtgagtgctgcggagctctgcagtcacacagcacggctgcttctctgttttcacatagccttttggtttacctgaagttaataattatcttgtttttttctttccttgggtttttttttttttaatggggtctcactgtgttgcctaggctggtctcaaacttctggcctcaagcaatcctcctgcctcaacctcccgagtagctgggactactgtctgccaccatgcctggctcacttccctaagtttttaatctatcttttttttttttttttgagatggagtctcgctctgttgcccagcctggagtgcagtggcgcgatctcagctcactgcaagctccacctcctgggttcacgccattctcctgcctcagcctcccaagtagctggggctacaggcacccaccatcacgcctggctaatttttttgtatttttagtagagacggggtttcaccgtgttagccaggatggtctctatctcctgacctcaagatctgcctgcctcggcctcccaagtgctgggattacaggcgtgagccaccgcgctcggccatttttaatctatcttaaagattcatccccagaattctcctctgttatctaaactcaggttctcacttgtgtgtctttggacatccctccagaccctttctgcctgctttggtttgtgcctgatatgtcccgtgttcattgtcaccaacatcctgagattctctgcatctttcttgaattgaatctcctcttttccagatcatccatcttcttcttacttggtttactcccttgttttggtggagagcatcctttagtagctttctaggaagggagacacaaaacataaattttttagagactttgcataaatgcttttagattatcttcacacttgatcaatagtttgggtatacattttgaagacatttctacttctagtttctagtgtagagacgtccactctattctgatttcttattctttatatatgactcctttccttttctctctctctctctctctctctctggaagcttataggatcttcctttgttgccggtgtttggaagtttcctgatgttgtgccttggtgtggttctattattatgcttgtcattcagtggacacttccagtgtgtagcctcatgtcccttacccctgggaaattctcttgactttttcgttgttctcttgtgctgcgtgttctctgtcttcttttaagaacctctgtgactcgtatgttgaacctcctgaattggttgagtaattttataaaatatatttttcttttttttttattatacttaaagttctgggttacatgtgcggaatgtgcagttttgttacataagtgtacatgtgccatggtggtttgctgcacccatcaacctgtcacctacattaggtatttctcctattgttatccctcccctagccccccaccccccacaggccccagtgtgtgatgttctcttccctgtatccatgcgttctcattgttcagctcccacttaggagtgagaacatgcagtgtttggttttctgatcttgtgatagtttgctgagaatgatggtttccagcttcatccctgtccctgcaaaggacatgaactcatccttttttatggctgcatagtattccatggtgtatatgtgccacattttcttaatccagtctatcattgatggacatttgggttggttccaagtctttactattgtgagtagtgccacagtaaacatacatgtgcatgtgtctttattgtagaatgatttataatcctttgggtatatgccaagtaatgggaatgctgggtcaaatggtatttctggttctagatccttgaggaatcaccacactgtcttccatgatggttgaactaatttacattcccaccaacagtataaaagcattcctgtttttccacatcctctccagcgtctgttgtttcctgactttttaatgatcgccattctaactggcatgagatggtatcccattgtggttttgatttgcatttctctaatgaccagtgatgatgagcattttttcatatgtctattggctacataaatgccttcttttgagaagtgtctgttcatgtcctttgcccactttttgatggggttgtttgcttttttcctgtaaatttgtttaagttctttgtagattttggatattagccctttgccagatgaatagattgcaaaaatgttctaccattctgtaggctgttcattatgatgatagtttcttttgctgcgcagaagctctttagtttaattagattctatttgtcaattttgacttttgttgccattgcttttggtgttttagacatgaagtctttgcccatgcttgtgtcctgaatggtattgccctggttttcttctaggatttttatggtcctaggtcttgtgtttaagtctttgatccatcttgagtctatttttgtgtaaggtgtaaggaaggggtccagtttcagttttctgcatatggctagccagttttcccaacaccatttattaaatagagaatcttttccccattgcttgtgtgtgtcaggtttgtcaaagataagatggcggtagatgtgtggcgttatttctgaggcctgtgttctgttccattggtctatatatctgttttggtaccagtgccatgctgttttggttaccgtagccttgtagtaaagtttgaagtcaggtagcgtgatgcctccagctttgttcttcttccccaagattgtcttggctatgtgggctcatttttggttccatatgaagtttaaagtagttttctccaattctgtgaaaaaagtcagtggtagcttgatggggataggtttgactctataaattactttgggcagtaagaccattttcacgatatcgattcttctgatccatgagcatggaatgtttttccatttgtttgtgtcctctcttattttcttgagcagtggtttgtagttctccttgaagaggtccttcacatcccttgtaagttgtattcctaggtattttattctcttagtagcaattgtgaatgggagttcactcatgattggactctgtttgtctgttattggtgtataggaatgcttgtgatttttacacattgattttatatcctgagactttgctgaagttgcttatcagcttaaggaaattttgggctgagatgatggggttttctaaatatgcaatcatgtcatctgcaaacaggggcaatttgacttcctctcttcctatttgaatacctttattgctttctcttgcctgattgccctggccagatactgccctttctcttgcctgattgccctgcctttccaatactatgtcaaataggagtggtgagagagggcatccttgtcttgtgccagttttcaaagggaatgcttccagtttttgcccattcagcatgatattggctgtgggtttgtcataaatacctattatgttgagttacattccatcgatacctagtttattgagagtttttagcatgaaaggctgttgaattttgtcgaaggccttttctgcatctgttgagatagtcatgtggtttttgttgttggttctgtttatgtgatggattacatttattgatttgcgtatgttgaaccagcctttcatcccagggatgaagccgacttgatcatggtggataagctttttgatgtgctgctggattcggtttgccagtattttattgaggatttttgcattgatgttcatcagggaaattggcctaaaattctttttttgttgtgactctgccaggctttggtgtcaggatgatgctggcctcataaaatgagttaggaaggattccctctttttctgttgattggaatagtttcagaaggaatggtaccagctgctctttctacctctggtagaattcggctgtgaatctgtctgttcctggaattttttttggttggcaggctattacagcctcaatttcagaacctgttactggtctattcagagattcgacttcttcctggtttagtcttgggagggtgtatgtgtccaggagtttatccatttcttctagattttctagtttatttgcataggtgtttatagtattctctgatggtagtttgtatttctgtgggatcagtggtgatatcccctttatcattttttattgtgtctatttgattcttctctcttttcttctttattagtcttgctagtggtttatctattttgttgatcttttcaaaaaaccagctcctagattcattgatttttttgaagggttttctgtgtcactatctccttcagttctgctctgatcttagttatttcttgtcttctgccagcttttgaatttgtttgctcttgcttctctagttctcttaattgtgatgttagggtgtcagttttagatctctcctgctttcccttgtgggcatttagtgctataatgtgtcccagagattctgatgctttgtgtctttgttctcattggtttcaaagaacatctttatttctgccttcatttcattatgtatccagtagtcattcaggagcaggttgttcagcttccatgtagttgtgcggttttgagtgagattcttaatcctgagttctaatttgattgcactctggtctgagagacagtttgttgtgatttctgttattttacatttgctgaggagtgttttacttccaattatgtggtcaattttagaataagtgtgatgtggtgctgagaagaatgtatattctgttgatttggtgtggagagttctgtagatgtctattaggtctgcttggtccagagctgagttcaagtcccggatatccttgttaattttctgtctcgttgatctgtctaatatagacagtggggtgttaaagtctcccatttattattgtgtgggagtctagatctctttgtaggtctcttaagaacttgctttatgaatctagttagctcttcttgttgaattgataacctttactattatgtaatggccttctttatgtcttttgatctttgttggtttaaagtctgttttagcagaggccaggattgcaacccctgcttttttttttgctttccatttgcttagtagatcttcctccatccctttattttgggcctatgtgtgtctttgcacgtgagatgggtctcctgaatacagcacactgatgggtcttgactctttatccaatttgccagtctgtgtcttttaattgggggcatttaggccatttacatttaaggttaatattgtatgtgtgaatttgatcctgtcattatgatgctagctggttattttgcccattaattgatgtagtttcttcatagtgtcaatggtctttacaatttggcatgtttttgcagtggctggtaccgattgttcctatccatgtttagtacttccttcaggagctcttggaaggcaggcctggtggtgacaaaatctctcagcatttgtttgtctgtaagggattttatttcttctttacttatgaagcttaatttggctggatatgaaattctgggttgaaaattcttttcaagaatgttgaatattggcccccactctcttctggcttatagtttctgcagagagatccactgttagtctgctgggcttccctttgtgggtaacctgacctttctctctgggtgcccttaacatttttgctttcatttcaaccttgtgaatctgacaattgtgtgtcttggggttgctcttctcgaaagtatctttgtagtgttctctgtatttcctgaatttgaatgttggcctgccttgctaggttggggaagttctcctggataatatcctgaagaatgttttctaacttggcaccattctccccgttgctttcaggtacaccaatcaaacatagatttggtcttttcacatagtcccatatttcttggaggctttgttcatttctttttactcttttttctctaatcttgtcttatcactttatttcattaatttgaccttcaatcactgatatcctttcttccacttgatcgaattggctgttgaagcttgtgcatgcatcacgaagttcccgtactgtggttttcagctccatcaggtcatttaagctcttctctacactggttattctagttagccattcatctgaccttttttcaaggtttttagcttccttacgatgggttagaacatgcttcttcagctcagagaagtttgttattactgaccttctgaagcttacttctgtcaactcatcaaactcattctccatccagttttgttctgttgctggcgaggagttgtgttcctttggaggagaagagacgttctggtttttggaattttcagcctttttgctctggtttctccccatctttgtggttttatctacctttggtctttgatgttggtgagctacagatgaggttttggtgtagatgtcctttttgttgatgttgatgctattcctttctgtttggtagttttccttctaacagacaggcccctcagctgcagctctgttggagtttgctggaggtccaccccacaccctgtttccctgggcagaggctgcagaacagcaaatattgctgcctgatccttcctctggaagcttcatcccagagggacacccacctgtatgaggtgtctgtcggcccctactgggagatgtctcccagtcaggctacacatgagtcagagacccacttgaggaggcagtctgtccattatcagagctcaggtgctgtgctgggagaaccactgctctcttcatagctgtcaggcagggacgtttaagtctggagaagctgtctgctgcctttgggtcagatatgccatgcccccagaggtggaatctggagaggcagtaggccttgctgagctgcggtgggctccacccagtttgagcttccccgctgctttgtttacactgtgagcatagaaccgcctactcaacctcagcaatggtggacacccctccccacaccaagctcccgcatcccaggtcgatctcagactgctgtgctagcatcgagcaaggatctgtgggcgtgggacccgccgagccaggcacaggagggaatctcctggtctgctggttgtgaagactgggaaaagcgcagtatttgggcaggagtatactgctcctccaggtacagtcagtcatggcttcccttggctaggaaagggaaacctttccccttgtgcttcccaggtggggcgacactccaccctgcttcagctcaccctccacgggctgcacccactgtccaaccagtcccagtgagatgaaccaggtacctcagttggaaatgcagaaatcacccatcttctgcattgatcttgctgagagctatagactggagctgttcctatttggccatcttgaaagtgcctgctctttttttaatctctttgtctttttgctttacttttttttttctttttttttgtttttttgaaatggagtctcgctcttttgcccaggctggagtgcagtggtgcgatgtcggctcactgcagcttctgcctcctgggttcaagtgattctcctgcctcagtctgggattacaggtgcctgccaccacacctgactgatttttgtatttttagtagagacagggtttcactatattggccaggctggtctcaaactcctgacctcaagtgatctgcctgcctcggcctcccaaaaggctgggattataggtgtgagccaccacacccagcctgctttactttttggaatgattttacaattttgtcctctactcattttattgtgttttttatttctaatatcacgtttttaatttgcaagggttttccttttgttctcttttctcttttctttttctgacagtgtcctgtcctcgtttcacatatatggtagtttctctcatttctctaaggagactaatgatttttgtgggggagttttcttctccctacactgtttctttttttgcagggtgcattactcggtttttaaggctggaggctttccttagatgtcatgcagtccttgattgtctgcctgtatttcaacgtagaggcccagtgagccggtgagggtctctgagtgtgccaagcctgtgggctgtgggtctctctggggagcgagctgctgtgagtacagggacctctgaattccgtccagatgcccaagggaaggcttctcctgtctctggcccctggggctaaagacctgcctgtgtcctgggagctgagtgggaggcacaggctgggtctcactgtcctgtgtgtgcttagcctccttcttttcagttcagcacctctgtttgcagctaggcctacagccccgagtcctgagagttctgctttatcctctccagagaatcagcccctggccttcctcgggttggggtgagtggccgtctggtgtggagtagtgtaaggtgatgcagaggttcccccctctgccacattgctgcagccagggagcctgcccctaattcctaagctttctgaaggttgttctctgcagatagggtcaggcctcccgcggctggctcagggtcaactgtcttggggctgttaccagtttgtccatctgttttttagcttccaacattctgttctggaatattgtctctaaaacatagcttttttgaaatatgattcatgtacccttttttcaagtgtacaattcagtgatttttagtgtattcacagagtttgcaaccacacaagtaagtgcatacccattagcggtcaccctccattttcctccctccacatcctttggtagccagctgtctgctttcagtctctatgggtttgcctgttcaggacatttcatatcgatgggctcatacggtgggtgggccttggtgacgctggtttcactgcacagtgtttccaaggctcatctctgccatatcataaactagcacagcatgccttttcatgactgacttatattccattgcgtgcatggagtgcatttcatgtacccattcatcagctgataacagttggatcttgtggcttttgcatttgaaaatccatttacagggccgggcgcagtggctcacgcctataatcccagcagtttgggaagccgaggcaggcggttcacctgaggtcaggagttcgagaccagcctggacaacaatggtgaaaccctgtctctactaaaaatacagaaattagctgggtgtggtggtggatgcctgtagtcccagctactcaggaggctgaggcaggagaatctcttgaacctgggaggcggatgttgcagtcagctgagatcacaccactgtactccagcctgagtaacaagagcgaaactccatctcaaaaaaaaaagaaaaaagaaaaaacgcgtttacaggaatgaggctttaggaaggagcgcagtttgccatgtgtgtaacccaccatctttatcctggagtccccgccatgtctgtgccttgtgacttctctgtgactgccactggccttacccatgttggggttgggctggatctagaggaaagcagtttcaaatttcttctcctctcagcagaggtgactgtggacaagtcctatctggtcttgttttctcatccataaaataaagatagtaaagtacactagtgattcctgagcttggctggggcccctcagatactctcagggggacctgggtggcagggttgtggcagcacaggtacaggccctcatgtctcataaaccaagcagaacagaacaggcagcagttgtacagctgagccttgggctgtgcagcccctgctatctctgtcaaggaagaactaaaagaatagctcaactgaggaaacaaacacctttttcttcacattcttcttttaactatcttacagattactgcagtttttaaatcctgatcctttgagagctgacggaatctctgatctccagcaggtattacaggccctaaaaaaagtaaaataaaaagagagaaaaaactgtttattctttaaatccttctccttcctccctccagacttgagattagaagagaaactccttagatgggggacttaacctgaagacatccttttagaaacgatcgaatggattgttgcttctgagaaattgttccttgttttttggataataaacgatcttccttttggtagtttggtggttttttttttctttttttttaagtaagcatatatacccaggtgtttacattgaaatctatattttcttcatttctgtgaagttcttgatctcctgtgctgacgcctcagggcagacactggttgtctaatgcacacgttctctcagttgcagaagctgaagggcctgcagccgcccgtggtagtgctccggaacaagatcaagccctgcttaaccattgactcgtcgccgctgtcagcagacctgaagaaggtaaaagtgctcgtaaaactgaatttatcaagaatgccaactttttctaatagagaaggattttgaaataaatggctctaaggttgcattgtataatttctttgcttttgaaattctctttttatttgagattacaggcatgagccaccacactcggcctaatttctcatttattcttaaatccaagttagcttcttagaagtgagtgagtgattgttttgtgaggcagccgctgtgtaactgtgagccccttctgcagtcaggtttccaggatgcctgtggacagggctgtgggaggagcagcaggccaccagggcaattgtaatgcactccccgaccgttcttttcaaaattgtcttacacacatatggtttcatttggaaaattgatcatacgtgtttatctacttttttcctgattaaaaaaagttaaaaaaaaattttttttaagataggaagctaaaacaaccaggacaaatagcatgagagagaagtggacagattccacagtcttagaagatgaaagcaggagacagagtgtggctgcctcttcagggaaggagtgctttgcgagcgaggggagcgtgaaccaccagctctgtcttctgagcacccacagccagcttgtattgttctcagcagcaaggttggaggctctttttggagaaatttgaatggctctagagaaatgaccttcagatgatgctatttggaattctcccatgaacagggcctgcttgcctccctgcctttctgcagtgaggtgacactcatgtgatgacaagagtccccagagcctccagttgggcgttagtgtcttgctgtccaccatgaacagacatcagggatcatggacatttgaagaaagccttcaccttaaaaaaaaaaaaaaagaccaggctgggtgcattggctcacacctgtaatcctaacactgggaggccgaggcaggcagataacctgaggtcaagagtttgagaccagcctggccaacatggtgaaaccccgtctctactaaaaatacaaaaattcgccaggcatggtggtacatgcctgtagtcccagctacttgggaggctgaggcaggagaatcacttgaacctaggaggcagaggttgcagtgagctgagattgtgccactgaactccagcctgggcaatagagcaagactccgtctcaaaaaaaaaaagaccgaaacaaactctcaaggaaacaaacaatgcagtgaggaggagaaaatgttaaagaataaatatccccagagagaataaatatccccggagagaagacattgcatctctaacagcttactgttaaagggatgtaatgttttttctctctggggatattgaaaataggatattttaaaaaggaacaggcagaataaaagattcttggaaattcaaaatatagaaaaatgtaaaaatcactagtatgtttgagacataaaagagaagctaactcagaaagtagaggaaaaaggcaaagagacggaaataggaggaaaaatttttgagggtcagtttgaggtccggtttctgaaaaatgggatttctaggaagaatgaaggaagatgataggacattttctgaagattaacataggaacattttctggacctaatggacaagaatttccagattaagagggcctacccatcacaggcccagcacaactgctgaagaaagagattctgaagcatctaagttgagggaatctaaagattatgaaggcttcaagagagatgaaactggtcctacacactggaccaggaatcagaatggcttcagatgtctccacagtgcaccaaatgagcattgatgtcaaaattctgatgaggtcaggtgcggtggctcacgcctttaatcctagcactttgggaggctgaggcgcagattgcctgagctcaggagttcaagaccagcgtgggcaacatggtgaaatcctgtctctactaaaatacaaaaaattagctgggtgtggtggcatgtgcctatagtcccagtcgcttggtaggctgagacatgaaaatctcttgaacctgggaggcggaggttgcagtgagccaagatcgtgccactgcactccagcctgggcacagaacgagactctgtctacaataataataataataataataataattctgatgaaaagctctttccaaccagaggtccttactcaaactgtggatggagcgtgagggtagagtgaagacatttgcagacatacagagtcttaaaaaaacgtacttcccttccaacctttgtcaagaagatattaaaatatgttctctaccaaaacaaagaagtaacccgagaaagatgaccacatgggtttgcagacaaaaggtgatggtgaaggatgataccaggatagttgctcaataccaagtgcagagcatggcgggtcctgactgcagctagggctcaggactcgagaggacctcacagagctcatggtgccgatgagctcggccatttggaagatcctatccatgtgggtggagaactctattggaacatttgggttttagtgacagttacatagaaaaataagcaaataaaagtctatcttttaaaaagctttacaagtgaagctgatggactggcagtttattaggagaatgaggaggaaaagccacatctttgatccagtgaactttaagttcctgtcaatgggccatctattggatccttttaatttagaaaattaaagcaagaatcttttttttttttttttttgagtcggagttttgctcttgttgcccaggctggagtgcaatggcatgatctcggctcaccacaacctgtgcctcccgggttcaagtcattctcctgcctcagcctcctatgtagctaggattacaggtgcctgacaccacgcccggctaattttctatttttagtagagacggggtttctgcatcttggtcaggctggtcttgaactcccgacctcaggtgatctgctcgccttgacctcctaaagtgcagggattacagacatgagccactgtgcctggctttttttttttttttttttttttttttttttgagatggagtctcgctctgtcacccaggctggagtgcagtggcacagtcttggcttaccgcatcctctgcctcctgtgttcaagtgattctcctgccgcagcctccagagtagctgggattataggcatgcaccaccacacctggctaattttgtatttttggtagagatggggtttcaccatgttggccaggctggtctcggactcctgacctcaggtgatccacccacctcggcctcccaaagtgctgggattacaggcatgagccaccgtgccctgcctagcaagaatcttttaatgggagtcttaataggagaaaaagcaacagtcttttaataggaggttggtactgagaaaagatttggggaaacttaacaagttagggcttggaaaatactgggtttggcaatgtgtagtgctttttggggtgaaatgagccatgcaatggagtttttgttagttttctctaccttattttggtttctggttgtttctgttttgtaggctcttcaaagaaataagtttccgggccccagccacactgaatcttactcttggcctcccatagcgcgtggctgtgatgtggttgtcatttctcactgtgaaagcaaccctttgctctacctcctaccagtgttgacagttttgcaaacaggagcctgctacaagtcattaccaagtagaaatggagtaagtcaaagacagttttgcctcacaaccaaatgggttaaatatttattttaaaattatacacctcacctttgaggaaggtcgtctattactcagtttggttttcaaacttccaggccagaaactgtcctgtgggaaagtgtcctttcccattccaattactgatgctctcatactgattctcacctggagcctatagttgtgggccattggctgaggcttttagaaatggatatggaggccaggcacggtggctcacgcctgtaatcccagcactttgggaggccgaggcgagtggatcatctgaggtcaggagttcgagaccagcctggccaacatggtgaaaccctgtctctactaaaaacagaaaaattaggtgggcatggtggcatgcctgtaatcccagctacttgggaggctgaggcaggagaatcacttgaacctgggaggcgaaggttgcagtgagccgagattataccattgtgttccagcctggacaataagagcaaaactccatctcagaaaaaaaaaaaaaaaaagaaagaaaaagaaaaaatggatatcgagtgtgtaaaatgctgtcacagacctgagtctatctatccatcacagtagcagcatgagatgggcattgttctgaccatttcacggaggagaaaatgaggctcaggaagagttactggggtaaatttcccactgacagggctaggagtggggttgaagtctgagcttctgctgccttgtcccgtgctctgccagtcatttcctagctccccaccctgcttcataatccttcttaacttttcccatgtgggaaaacctcagaataactgtattaagtctgttctagcattgctataaatacctgaggctgggtaatttataaagaagagaggcttaactggctcatggttctgcaggctggagcggaagcatgatgctggcatctgctcggcttctgcggaagcctcaggaaactcacaatcattgcagaagtctaagggggagcaagtgtgacacatggctggagcaggagcaggagcaggggaggtgccacatacctttaaacactagatctcagaagaacagcaccaagaggacagtgctaacccattcatgagaaactgcccccatgagccaatcaccccccaccagcccccacctccaacactggggattacatttaacatgagatttgggtggggatgcagagctaaaccatttcactgagaaagaggtggtgggaaagagaggagcggtgtgaaggtaaatgatgcagggcatggccctgtgctgctggtttgtggctgttaggggcctgatgggtgtggaacctgcatctcggggcctggcactgagggtgctccagacggggctccaccagtgaaaaacagcagtaagaagacatagggttgcagttaggaaaaatactagctcatttttctaaccgtgccatgcagttttatgatttccctttagaaagttgcatctgttggccgggcgcagtggctcatgcctgtaatccagcactttgggacgccgaggcaggcggatcacgagatcgagatcgagactatcctggccaacatggtgaaaccctgtctctactaaaaatacaaaaattagctgggcgtggtggcacacgcctgtagttccagctactcgagaggctgaggcaggagaatcgcttgaacctgggaggcggaggttgcggtgaggcaagatcgcaccattgcactccagcctgggcaagaagagccaaactccatctcaaaaaaaaaaaaaagttgcatctgttattagcagctgatttagtcaaattaatggatatgtttctatctcccaaattacttagcagcagactaatgagaagcaactgatgagaagtcgcttatattgaggccgaacccaggctcagggcagaaggggatgtccaggtctcgtccctgtggcccccagctttctccacgcctccatggtcagcctgctttcaggcctgtgtctggaagctgggcccacctggatctgtatgaatgaaagaggagcctcagcttgtcttcagttactggagggtgtgtgtctggcaggcagtgcagcttcaggagttacctgtcggcttgcagagggcagggttcagaagatagtgtcctaaggaagagaggttcgtctttttttttttttttttgagatggagtctcgctctgtcacccaggctggagtgcagtggctccatctcggctcactgcaacctctgcctcccgggttcaagcaattctcctgtctcagcctcctgagtagctgggactacaggcacacactaccacgcctggctaatttttgtatttttagtagagatggggtttcaccatattggtcaggctggtctcacactcctgacctcgggtgatccacctgactcagcctcccaaagtgctaggattacaggcgtgagccactacacccagccagggttcgtcttttttaaggcccctttcaggaggcatttagttcattcttgtgcttaggatctgtgcaggggatgtggagccagactgcctgggttcaagtcctgttgctaccatgtattagctgtgcagccttgggtaactgacttcacctctctgtacctcaagttcctcacctctgaagtgaagcagtgacagcctctgccccataagagcatcttaagagctaaatgaatgcatacgtgtgaagtgcttcattgagactcagcaaatatgactcaatgtgtctaaatctgttttaatgaaattatatcgtcacttttctgacctgtatgatgattatagcagaaacttacggggtgctgcttctgtgcaaggagatgttcttgatgtttcatatggatgctgaattcctaactactgtctggagtcatttgaatttgtctgtcttcgcagcctctcgcagtcatcgtgtgccctgggtggaagaaggcccaatttatttttgaattattgggagaatatagcatgtcctccaggcctcttcatcctgtgctattaacaattgggctccataaagaggaagccaaaaatacaaagcttccaaggggctgtaagtatccttttcaagcggctataaaagttaaagtatccttttcactgtcttccctacagaagacagtggagcctggctgggcctgggtccacagtgacatggcttgtgtgatgacacactcacagtcactagtccagacctacttgtcagctcccgacggttttgattacgaaggcttgatcttgacttacgtctgcttcactgagaaaactatgtcacttcattcatttatcatctatttactgaacacttaaactgtttgttagatgctgggcatatggggttgactaggacagaaacagtgttttacttcattagaaggcatttctagaaagtatgtggactcttagcagaggaaatcttagaaaaacctgtggaaaattgaaaatgttcacttttttttttaaatgcaggtgatgtgattgttacgaccccatacagcctgctgaggcttctcgcctgtcagagcctgctgttcctcaggctctgccacctgatcctggatgaggtagaggtgctattcttggaagccaatgaacaggtgagcgtggcttaaggtcctcagcactcagaagagaggcgtgattaacatgctaactgatggcaggaaggaggaaaagtgtctggttggggaatacattggttaatctaaaaaaattttatgctttaacttctataattaagaagaaagaatggttatgtgaaatttccttcccagtgttagaattctttctgaagtgcaaacattctttcctagagatttcctaaaatacttaaaatttttctgattacagaagtaatgatttttattttagaaaatttaagacatggagaagagcacttgaaaaacccagcctgcacagccatagtttcagaagggatccctcttactattttggagtatttgcttctttttctttgaattcttgtgtttgtagatacatatagttaataacatcaggggtgtgttttacaggccattttgtagcctgcattgtgcagggcgcagcagcgtaagggccaccgcttcctgttccacagcctggtggttactggccatatagtattcagttctttggacatcacagaatttgttttacaactgtcttaatattggatattcaacataatttgtatacgtgtgtggctacagaacatgcatgctttttgcacctgtttcctttaggatgaattcctaggaagggattcatgggtcagaggctttgagctcttgtaaggcttttcttggaagcagtgtcacacagtcaccaagggtatgcacttgggagtaatgatggccccagttttgagtccaggctttgttactgactatgaggcggtgcagggttcttgaactcctctgaagtctcaggttctgatttttgtaaaactagtatctaggcatactgctctgtgcagcatcctttctgaaagcatgacctgatgtgcactcctgtcagccatgtgcaggctctccacacccctgccagagcaggcttgccccagttttctcctccagcctaactggccaacagtgggatcttgtcagcctaatttacatttccttgattattttttaggttgaacattaattcgtattgatcatttgtattcactctgagttgcttgttcacttccttttcttattttctgttggtaggatcatcttctgctaatcagtttttagaagtttttatgcaagaacattaatctcttgtttgtttgttatacatatttaccaagatattgcttatgctttagttttgtttataatggagattgtaggatatttattgactttaaacttgacattttctcctatttagtttttgcctttttttttttttttttttttttgagactgagtcccaccctcgtcgcccaggctggagtgcaatggcttgatcttggctcactgtaacctccacctcccgggttcaggcaattcttgtgcctcagcctcccgagtagctgggattacaggtgcacaccaccacacccagctaatttgttgtatctttagtagagatggggtttcaccatgttggccaggctggtcttgaattcctgacctcatgatccgcctgcctcagcctcccaaagtgctgggattacagacgtgagccaccacacctggccttttccttttatttttgaaagactttctccactctgagaacagaaaatatacaaacccttacattttatgttctgccacactagttcttactcttttgaaataaaaatgaaattaattatgctaatttttcagatgtttgctatattagataactttaaaaaaaatattgaagttgaagaaagggaatctgcaccacatcagattgttgcagttggagttcattggaacaaacatatagaacatctcatcaaagagttcatgaatgatccctacattgtgatcacagccatggaagaggctgctctctatggcaatgtccaacaggtaactttgtgtgtatgtgtatgtgtatgtgtgtgtgtgtgtgtatgtgttggtggggggctgatgaacacaagcaagtaacttttatttcatggcttagtattaaacaattacagctttgatttcatatataaattatgaatgaaatacaattatagttgaatatttaaatttatattgatttcctatacattcttttctattaaaatcccaacacctgtggaaagtggatctggagcacctaaaatattaaaaagtcacattgtttctgtgcttcattaccaggtagtacatctttgcctagaatgtgaaaaaacttcttctttactccaagctcttgattttattccaagtcaggcacaaaagaccttgatcttcacctgctctgtagctgaaacagaaatagtgtgtaaggtgagtccatctccatataaaaaatgttctgtttgtttcaactggtcgaatctcaagtcatcacaaaattactggggtggttgactctgtggcagggaagtaaagttttacaagtttaacatcaatcagaagaggaggtggggtcttctcacagagcatgcaggctgaggcctggatctggggaggagccaggtgcgggggcagggcttttcctctgcagcagcgttccccagggcagggcagtttcgtcttggtggagtattaaaagtatcaatttatagacatgacaacatcttctgtaccctctgtttaagaagattgaggtggctcatgcctgaatcctagccctttgggaggccaaggtaggaagattgctggaagccaggagttcaagaccagcctgggcaacatagtgaaaccctgtctctacgaaaaaaaaaaaaaagaagaagaaaaagaagattgagaagataacagtaaaagatatcatatagccaaaaaatcaaataaattggctaaagatttattcagttttattttgtacatattagtgctaaaacgtagaaatgaagccaactaccaaataaaagaattaatagtacatctagctttctgcagcagtcagctagaagtatagttatatggtactgtagtcaaccaggactttctagctgatgtgtctgtgtgtgtgtgtatgtgtgtttatacacacacacaagtatggctgtgttattttaaaaggaagcaaaatagtttcagcaaaatactgcttatttcacttgagcaagattttagacataaacaaccgaattttggaaatatatttcagtttataatcatctcattcttaagaattatgggatcagtgaggtagtgccctcacagataaattaaagtgctttacattgacaattattgatggaacggttggcttccagcctatatccctgactgtgacctggcctctttgatttcatctttaggtagtagaaagcagttcaatattttgcttgaagatgcataaagaaatgatttttaacttacaaaatgttttagaacagtggaagaagaagttaagttctggctctcaaattatattaggtaagtgttttaatttctacttctatttagtgaaggttgagctactaggaattctatctttaattcatttatatatctcatctccagatttctcattattccccaggtttactgagactttattagcaatgttaatttcaaaatgaaaaattaacctccactaagattttgatgttgaggtaaatctctcaggtcagtgggcagccaccattagtctagacattctccctagagttatagcttgaggatcactatcatatatatgatatatattatcatatatatatatgataatatatatcatatatatgatagtgatatatatgatagtgatcatatatatgatagtgatcatatatatgatagtgatatatatgatagtgatcatatatatgatcatatatatcatgatagtgatcctcaagctatatatatattcatgtatatgactatatacatatgactatatatagtcatgcatgattgctaaatttaatattaaaaatataaaagtcaaaatatatagaataagtgaaaaacatatgggccgcttggatttgtaataagagacatttttcaggctaagaaggagaccacttttctctggaatttaagcactgggctgtggcattttggggaaaaaaatggggaagaagtttctttgcatccaaaaaagtaaaatgtgatatggaaatgcactgcagtgtggccgtgggaactgccggttaaagtaagtgcggtaactccagcgcgtgtgacattgtcggactccctctctgcagccctcacagacgactgcgtcccactcttggccatcaccgatgccacgtgtgtgattcacttcagtttccctgcctcaccaaaagtttttggtggacgcctgtattgcatgtctgatcattttcacgctgaacaggtttggtgaatttttattctcttccatattccactggcatcttctgtgtcatgataagctcagagtccacaaggtttcctcagtcagactgggatagatgatccacttcctttattcacccccaattttcagggttctcctgcagaacagggagataagaaagccaaatctgtcttgctgctgacggagaaagatgcgagccatgcggtgggcgtcctgcgctacttggagcgagcggacgccaaggtccccgcagagctgtacgagttcaccgcaggagttctggaagccaaagaagataagaaagccggaaggcctctttgtccatatctgaaggcttttggtttttgcaagtgagccagtaatttgtttcttattaaactgatgtataacctgcagtaaggtgcacagctgttgcaatgtggtgaattgtcatgtatctagaagccaccacccactctgagggagcagtctgggggttccctcgcactcttccccacgtgccctcccctctgcagggctgtcagtgttgattaactttgcatgattttgaactccatagaaatggcatcgtggtatgttctctttcgtgtctggcttctttctctcagcctcatgtctgtgacattcgtctgtgttgttgtgtgtatctatggtttgttttatagctcagtgttctgttgtatggctgtatcacagtgtgtgtatccattctcctattgatgggcctgtgggtggtttccactatcaggctatgatgtttgaagctgttaggaacactcttggccatgtcttttgtggaaatgtgtacgcatttctcttgggtagacgctccagagggcaagtggcaggtcatggggtaggcatgcgtttaactcttccaaagcggctggccattttccggtctggtcagtactgtctgacagagcctgagttgtccccaaccctcaccagcgcttagtgttggtggaggtggagtggtaaaccattgtgatgttaatatgcatttccctaatgattaatgatgttgaatatcttttcataggcttgtgggacagttggccatcctctttttgtgaagtgcccgttgaggtcttttgaccagtttttacagggagtgtttatctttttcttcttggtttgtcggggggagtagcttatatatactcaacataagtactttgtgtgatgtgtgcactgagaatgtctcctccaagctgtggcttgcattttcactcttttaatactctgctgatgatgaacaggcatttttaattttgatgaagttttttttgttttttgagatggagtttcactctgttgcccaggctggagtgcagtggcgccatctcggctcactgcaagctccacctcccaggttcacgccattctcttgcctcagcctcccgagtagctgggactacaggcacctgccaccatgcccagctaattttttgtatttttagtagatatggggtttcaccatgttagccaggatggttttgatctcctgacctcgtgatctgcccgcctcggcctcccaaagtgctgagattacaggcgtgagccaccgcgcccagcctgatgactttgtgtgcttataggaaatatttgcctatcttggccaggtgcagtggctcacacctgtaatcccagcacttcgggaggccgaggcaggcagatcacaaggtcaagagatcgagaccatcctggccaacatggtgaaaccccgtctctactaaaaaatacaaaaattagctgggcgtggtggtgcgtgcctggagtcccagctacttgggaggctgaggcaggagaatcacttgaaccctggaggcagaggttgcagtgagctgagatcatgccactgcactccagcctggagacacagcaagattctgtctcaaaaaaaaaaaaaaaaattagctgggtgtggtggcacacacctgtaatcagttacataggaggctgaggcaggagaatcaattgaacctgggaagcggaggttgcagtaagccaagttcgcgccactgcactccagacggggtgacagagtgagagattgtgccactgaattccagcctggacaacagagcgagattccatctcaaaaaaaaaaaagttgtctatttcaaggtcatgaaggcattctcctatatttctagaagctttgtagttttagctttcacagttacacttataattcatattaaattagtttgtatgtatgaccaggtatggtggctcacacctataatcccagcgctttgggaggctgaagtgggaggatcacttgagctcaggagttcaagaccagcctgggcaacacacagagaccccgtctctttaaaatatatatatgtgtattatatatgttatatattatatatataacatatataatatatatatacacacacacacacacacacacatatatatatatataagccagctgtggtggcacatgtctgtagtcccagctactcaggagccttgggtagggggatcgcttgagcctgggaagtcaaggattcagtgagacgtgattgtgccactgcactccagcctgggtgatagaatgagaccctatgtccaaaaaaaagaaaaaagaaaaaaaaaatatgtgtgtaatatgagatctggggcaaggtttgatttttccatatggataatggtttgctccagcatcgtttatttaaaatatcattcggttctcactgcatgagtgcgtttgccatgagccaggtgatggtatttgtggtccatttttggactctattctgttactttggcctattggtctaactttataccagtattacactttgttatagcacgtcttaggagctggtgtatgagtcctccagctttggtcctcatcaaggttgtttggctattttaaatccattgcatctccacatacactttattttttttatcttttttttttttttttttttgagatggagtcttgctctgtcacccaggctggagtgcagtggcatgatctcggctcactgcaacctcctccttctgggttcaaacaattctcctgcctcagcttcctgagtaactgggactataggtgtgtgccaccatgcctggctaatttttgtatttttagtagagacggggtttcaccatgttggccaggctcatttcgaactcctgacctcagctgatccacctgcctcagcctcccaaagtgctgggattacaggcgtgagccaccgcacccggcctccacgtacattttagaatgagcctgttagtgtcttcagaaaccttgcagaattttgctagggagtgcattgattgtgttgatcagcttggagagcatgggtaccttgacagtcatggggcttctctgcctgatccagacgcaacaccactgcgtgatacacagacagctgaggctggggcatgggtgcctgatacgtagctgctggattgaatttaaagataactgttgacattaacgtttttgaattatggtacattaaatgtgttactagcagtattcctatttacgcttaaagaagaccgagtttttttttttttttttttaagacagtctctgtctggctctgtcacccaggctagagtgcaatggcgtgatctcagctcactgaaacctccgcctcccgtgttcaagcagttcttgtgcctcagcctcctgagaagctgggatcacaggcgtgaaccaccacacctggctaatttttgtatttttagtagagatggggttcgccatgttggccatgctggtctcaaacccctcacctcaagtgatccgccctcctcagcctcccacagtgctgggattacaggcatgagccaccgtccccagccaaatactgactttatttatttatttatttatttagagatggagtcttgctctgtcgcccaggctggggtgcagtggcaccatcttggctcactgcaacctctgcgtcctgggttcaagcgattctcctgcatcagcctcctgagtagctgggactataagtaggcacctgccaccatgcgcagctaatttttgtatttttagtagagacggggtttcaccatgttggccaggctggtctcgagctcctgacctcaggttatttgcctgtcttggcctcccaaagtgctgggattacaggcacgagccactgtgctcggcctcaaatactgacttttaaaacggcaatttcaactatttctcaacgtggaagcagcattgtagttaaggaacggcttctgggttagagatcgattgccctttgttgtgtattatggcaatgtatttctaattcagtctttattatggaaatacattttgttcatttacataatgcattttagaatgtctagagaaatagggtggctgagcagggaggatctcttgagcccaggagttaagaggctatggtgagacatgatcttgccactgcactccaggctgggcaacagagtgagaccaaactcttaaaaaaaaaaaaaaaaaaaaaaaaaaaaagaaagtttgctagagaaataatgaaataactcattaagtttattcagtgttaattaaaatgtaaaatccattttcacttatttgtatattattaatgtcatctgaaatatttaatgtggttattcagtctttagggtgtttggaataaaagttatctgatttaggttgcagattaattttctgaagaaagcgttaaaattcacattaacaattattacttacttatgataagtctagtcatttcattttcagagacaaaaggatctgtcctgaccgacaccgtattaatccagaaacggacttgcccaggaaactgtccagccaagccctaccttcatttggatacattaaagtaggtttggttaaagatgcttgtgtcctctgacgaatggtcatgttaataaacgtgttttatttgttaagcaggatcttagtagatgtcatggtgccttccagtgatcagtattaacataccaccattagtgcaaccagaggcacgtgtccttacaaggcgccttatttcagggccccagcgtatttataagccaagatcaaattcagtaatggatgacagtttaaggatttttttttcaattatattttcagaaaatgtttctatttgggggccattaaaaataatgcagtgactgggcacagtggctcacacctgtaatctcatcattttgggagactgaggtgagcagatcacttgaggccaggagttcaagaccagcctgggcaacatagtgagatcttgtctctacaaacagattttttaaaaaataatgatacagtgattacatgaatcttttcaagacattcatgataatttctttgaggaaaattctgtaataaggtgcagatagaattgccaagttaagaatttttttattttctttctaatccttttttattaatttattcatttctttttgagcatacaatttctctccctttcatctgtttcccttagagcagtatctgttgtgttaatttcctaggctgctgtaaaagattaccaccaagttagtgacttaaagccacacacatttcttctgacatgttcctggatgtcagggtgtcagcagggccatgcccctccacagcctccagaaggtgacctggcctgtggctcgcctggcgtccttgcatctccgccagcagccactgtcactctctctccacctgcatcttcacatgacctcctcttctctgtgccccttgtaaaggacgtttcattggagggagggcccacctagataacccagagccatctcccagtctgcagacttcactacctctgcaaagaccctgttttcaagtcaggtcaaagtcacagtgagcttgggggttaggacatggacatacctcttttgggagagtcaccacccaacccactacggttttcattattgaatttttaaaaaaatttctaactctttcctgcattctgtcacctcatttctaagttgttgtaattctgatctgttactcttttatacactcattgttttcttagttaacaaactgaaagcaacatttcttgaaggttatagttttgatctgtttgtggatgtatctttctaacaggtttcattgtctgtagggatggttcttctgctctttattctctttttaattattttatttttatatattattatacattttgttattttatgatgacttcatatcggatttgaccttgttactttgctattgctcatttttagatagaatttgttttcttgacattttggaggaggtgtgggtcagggtaacttttctgatttcacagagttcccatttctgttttttatgtgctgtgtaaaatgaatatggtgacatagtgtctgagatttctgagattccctggccctgttcccctcctgaactgttacctggttttctcttccttcatccctcctgtccctggagggacagtgtggagatttcacaggggctccagccttcacccactgtggaggcaggtgaagccttccaggctcgcttgttgcactggctgagcccgtttccagggagggcctcttgcctcttctagagctctctgttctcaggtctattgcttccctctgcttcctcctgcacaggcacagacactggtgcctgtgggtgtcgccagcccggtcctctcccctatcctgccaagtgcctacttctcactcctggcatctgctctgggcagccagggctccctcccttcacacagagcgtctctgccctctgcacactgactttttcctcacacacaggtccccctgcctactctaacctgtgaagggctgtcttctccagcacacacaagctgtggcctctctgtccacttctggattgcctaggtccctgtaggacagtttcatccctgtaaccctggaggctgatatacagtagctcttaataaaatgcatcttgttacctgaaaaaagatcagaaagtttcaagagacagcagtgctattttaagaagaatttctataaaagtgcagttagaaggtaaacaaggaacacttatacctaataatgaagttttaaaataatgaaatttgcaaaataaaaaaatcttccattagatttaaagtgaaactaattctttatgactgtgtgaggtattggttttgctttgcttttttggctagcttcctagttttttctaaatccacgttgctaagctttggtttcttaggttgggtactgatttctgcagatacagggaatgtgtacatatccggtttagactaagtttgtttcttggtcatgtttactatatatgtttcagataatacctttttatattttgaatgcaacaaattactttggccgtatagttgataaacacatggatctttatgcaactctcaatgctgaaatgaatgagtattttaaggattctaataaaacaactgtggaaaaggtggagaagtttggattgtatggattagcagaaaaaacgctttttcacaggtaacacatctgtttacttcatctgtaaagttttgaagcatgaggtaactaagtggtgttgagttccgattttgacctctgtccatttgactgagtgtgtatgtgagcctggtgacagcggggtgtccccccagatgcctgctccagttctttgtgggaaactcttccccaggctcctgagcccagtgacaccgtgacccattgagccatcactgcgtgcgacatacacatacatctttaactcacttaattcttgccaagttcctatcaagtgggcatcattcccattctacagataagaaaacagccttggcgatgttacgaatgtggtgtcaggtcagctcgatacctggcatagtttgttccaacctggtcagtctgaatcacatgctcgtttgtacccacttcccttgaatccacacctggcaccacttggtgatagccttgaattcagaaactttgaaacttgacaggtgacgttgctcatgcctgtaatcccaacactttgggaggctgaggtgaatggattgcttgagcccaggaggtcgaggctgcattgagctatgatcatgccactgcactccagccggggccacagagcaagaccttgtctctacaaaaaacaaacaaacaaaaaagacaaaaggaaaaaaataaaaaaactttgagactttaatttgctatgttaatttttattatgttgttagataaaaggatttactcttattcaaaagtacatgtttttatacttatgtatactttaaataatccaccacttgaatttttgaaggccttagttttttatttctagtatagagtaaaatcatggcgttttggagtctttttatatgttttccatttcatggtaatttgaggcaaagatgatcctttctggaatctctgcgttgaaccgatgccccattgctctccagggttcaggtgttggaagtgaaccaaaaagaagacgcctgggccctggatgacatccttgtagagttcatcgatgaaggcaggacggggctcgtcacaagggaccagctgctgcatctcccagaacatttccacacacttcccccgcaggctgtggagtttattgtctgtagggtgaaacctgctgacaacgaaatagaatggaatccgaaggtgggtgattttggctttttatctattgttgacttttagaatatatttaaccgagaatatacacagaattgaggcctgtctggatttacagtgtcacgtttgggcagggaaagtgcagtctgcttagatccccacggtgtgtgaacgtcccagctgaaccctcggagaggtaccaggcagctgcaacactgtcttcaccactgtccttgtgcttacggtcacagaatctgtataaagtagggatgttggtaaaataaactgcccctcagcctaagcaggggaagcacctacaaaagtgaacattccaggctgggtgctgtggcctgtaatctcaacactttgggaagccgagggatgaggatcccttgagcccaggaagttgaggctgcaatgatctatgatcgtgtcactgcattccagcccaggtgacagagtgagactctgtctcttaaaaaacaaagcaaatcaaaaaacagaaaaaaagtggaaaagtggaccctccagccaaagagggggcacaatgggcggtcccaggagaggccaggtgattccactggtgcagggacgatgggccaggaaggagagatggagatcagaaaagctgccaaaggaagggtcatttcctctgggcttcgtggggtaactagggtgtcaccaaatagaacagatggggcgttgaaagcaaagagaaccacttgtgctcaggcacaggcacagaagagggctccatgcgggctcacgtggccatccagctggagtgggaaggcccagcccttgcagacctgtgctgagggcacaggcacaggggggcccgcgtctcaggcactgtccaggtggggtgggaaggcccagcccttgcggccagggagaaacctgcagccagtcctgcccatcactggagcatgagtcgtgttgataagcgctccagttctccaaggaaaggttatattttgcataattcgacaaatgggacatgaaataagttaattgcaattggtaaagtacaaacagtttgggttataaacaaagttaaacattatccaggaaataaacaagtgaatgtttccatgatacaggataaatacacaaccttactcttctaagtttagtaaaaggagcctttatcacaaggcagtggcattccttctttgtaatgactgtctgctgtgtaccaggtgccctactgggttctggggatgtagccgtcagcaagaatgtcacagttctttccccaagaaacatctgacctgtaaagatgactgaccaaaagtatttcttgaaggagcagccttctgtgggaatggagaaaggttctcctgtgtacattcttctgaattaattcaccaagtgcaagggggatggaaacgggcaggtccctttcgccctgctttgttcatgtgaaaatgtgtgtgagaggttgcttagacaggtcctgcctgttgtgttcctccttgagaggaaactgccatggccaggcatggtggctcacacctataattccagtgctttgggagcccaagatgggaggattgcttaagcctgggagttcaagaccagcctgggcaatattgtgagacccccatctctaaaaaaaaaaaattaaaaattaaccaagtgtggtggtgcatgcctgtggtctcagctactggggaggctgagtaaggaggatcgctggcaccctggagttcgaggctgcagtgagctatgattgcgccactgcactccagcctgggtggaggagagagaccctgtctcaaagaaaaaaagaaagaaaacaacagccatttactcagcaaggggtacacaaagaccaggccctcagctccagtgtcactggctgcaaggcagctccattgcagtgacggccttggagcaggaggaacaactttcacttcactttcattgagctttcaaagaaataggcatccgtgctttaaagacagattggcaggtgatggaggagatggggtacgcacgtccacagaagaaaatgtacagtgttgggtcccaaaggcacagacccccgccttgagctctgggaactcactagtacgaggccatgggcgagttcctttccacacctgcctcactaaactctgctgttagccttgtggacgagagggggtgatgacctctgtgatctcatagcattactgtgaggctcaaatgaaatgcatggaatattttgcaaactgtatggcatatacaaaataaggtattttgttaaagcctcacctaaaataatgttaagtgcttttttcaggttactaggtacattcatcataaaattgttggaaaattgcatgatgcaaaagtgatcctggctttgggaaatacagtttggattgatccaatggtaagtacgcattttttcttagaaataaatttgtttgaatgggcggctaaaattatccagattattctaagccctcacttgaataactgctgcatagaaacggtgacttatttggggatttgttagggagaggtgtttttcatgttattgggtcatgaattgggttgtgggtttagtttttgttcaggggaatattttacattgtaaccccagcgcacacgtgcattgtgtatgcgaggcacacgcacgcacacacatgcagccgaacaaagctttgtgaggactccatgctacattctctgatgctgacagtttctaactttctcattcaccacgcacttaactgagcacctgccacgtgccaggagcagtgctgggcactggggttccttctgtgagcaaagcagacgaagcccccatcctgcagagcagccgtgggagggggcgggggaaagggggaggggaggacacatgacaaggacatgtgactcacgggcctccgtgtctctccacggctgctggcaccaccctccctgcttgttccccaagagctccactcctccactcaaagttctgctgtattagacttaaatcttactatgaatacttaccagatttaacagagtcaatttataaaaacttttgctgaatgttatttttatgaggttggaaaagttttaacatgttaaaagggagtttggatgtaaggtttaagactaagcagaaaatggttttcagaagagaaaatatggattacaaatgcaggtaaatgaggagatttgggcatcttagttgatgttgtgatagtattgtgtttgtttcttgttggggggagaaaagcagatattttattaagcagagatttaaaagagattgaagtaaaaaagaaagcccacctggcagatgtgtccacactgcagcacgtgtggcagtgaccacggcggccagagggaaacagacccaccctcaccatctccacccgttcctgcccccacccattttgagcagagagaggctcctccacacattccccggtggacacacattcctggggttcacctaggaaggggccccagccagggcaggcctggagcaccccccaccctcaccatgggagggacagcccctcctatacccacactgccaccaacagtgccaggctgttgcagatttttatgttttacttaattttgtataaatggaaatggatgaggatgtttggttgcagaaaagacgaacagaagaaatggcccagaacaggattcaggtccttggcttaggtccttcccatcaggcagacgctgagcctcaggaggtaaaagtagttgagaaggaatgagaaagatgtacgaattatgcatctgactaggggtttatcccagatttgcaatttggtcttgactaggggtttatcccagatttgctcttgccacccccccaccacctgcccatatttctgtggcatggggtgaggcctggatgatttggatggaacctcaggtaggaagcaatccagatgctgccatggaaagccctgcacgttgtggcaagcgccgaagtgcagccaacgtggcaggctgaatgaaccagagaggccctgtgggaatgtctatgcttcagttaaaattcagagtgattactgctaatgttcaattttttcattgattcaaggtgcacattacaaacctttccagtttaaaaacctctgtcattgattataatgttcgagctgaaattttgtccatgggcatgggcattgataatccagaacacatagaacaactgaaaaaattacgcgaagatgctaagataccagcttgtgaagaaagcctaagccagaccccgtaagtggatttctgtctcctttttggaagagttgttttttggaaatacaactcacaagtgttaaggacatgttttatgaaagtagaagagttggctgggtgcggtggctcacacctgtaatcccagcactttgggaggccaaggtgggcggctcacgaggtcaggagatcaagaccatcctggccaacatggtgaaaccccgtttttactaaaaatacaaaaattagctgggtgtggcagcacgtgcctgtaatccctgttactcgggaggctgaagcaggagaatcgcttgaacctgggaggcagaggttgcagcgagccaagatcatgccactgcactccagcctggcgacagagtgagactacgtctcaaaaaagaaaaaaaaaaaagtagaagggtttttaatgagtctccatgtacccatcactcagttgtaataatgaccaagattttggaaatctagttttatctataccccagcccacacttgcttttgttggagtattataaagcagatctcaaatatagtattttacctgtatttcttacagaaaggattgttgttaactttttcttgacaaataacgcacacacagaaaagtgcgcacatcagacgtgatgtgtttcctgaacatacctgtgtaaccagcccagatcaagaaacagagcctggctcagagcctcccctccctctaggtactccccctccccaagaggagccattctcctgatgtcgaaaagcagggatggttttccccagttttgcactttgtttgaaaggaattagacagtatgcctcctctccatagtgagttacagaagctaggctcaaaggaggcataaattctctaaattctcacagctacataatgttcctttgtatgaatataccattatttgtttacccattctactgttgactggggaaatttccagtttggggtacttcaggtaatggcgctttaaacattaccgtacatgtcttttacaaatatatacacttacaaatatatttctgacggaatgggattactgagtcatagttagagttactacccaatagtgttccaaagtggctgcgccagcgtctcctcccatggggggcattagagagactgtgacagtcactccgaggagggatcctggcagctccagagggggaaggatctgtatcaagaactccttccagccaggaggaaaacagcaggcacctgttaggaaagtgggcaaaagacctgagcagccacttcaggatacctaattaccatatgagaaggtgctggaactcctgagtcatcagggagatgcagatgaaagcccagggagtaacaccacagcatgcccagcccaccagagaggggaatgagagaaggaaggaaaacacgcaccaagtgtgggcagggatgagagtggcagggcttcccaaaacttgaccagagcactgttagcacagctaaaaaggctcacagtgattccttcaattgcatgtgttttatcgtggcaaaataaacatgacaacagctgccatttaaactctttttaagtgtacaattcagtggcatttaggacattctcagtgttgtgcaaccatcatcgctatccatctccagaacttgctcatcatctggacagaaactccatactccttaaataataattccagagtccaccccccgcccagccccctactctcctttgtctctacgaatctgccaatcctgggcactttaagtggaatcgtccactgtttacccttttgtgcctggctcgtctcagtgtaaggtcctcaaggtccacacgtgttgcagcccgggtcagatttccttccctttgaagctcatcctccatggcatggatcaccacgtttcacttctccattcatcttcctgcgcacacctgggctgctgcccctcttgactgtggtgagtgtgctcctgtgtatacaggtgtacaaatacctgtttgagcccctgccttcacttctctggggttgctactcagaagtggagctgctgggccctgtgggaatcctgtgtatgatttttggggaacctccatccaggttccgcagcagcttccccattgcctgttccagcagccatgcccgaggcctgcagttctccatgtcctctccttgaccccgcccgaggtgcaaactccaggtctcttcagggctcttccgggcgtgcctctgtgcgcttgtgcaattctaaatggcccgtacacacgactgcttttgaacatcctaattccccagtctcttgctctctgcgtctcctctggcccagcccacccaggcatcctagatctgtagggcctggtagctttagaagcaggcctctgtctcaaaaaaaaaaaaaaagtgtttttacccatgcactccaagctctgtcctctactgtccccagacaggctccacagatgcacatgattatttgcaaatgaagtctgctctgctttctccaggccgagggtgacagggaccagtcctgctcaagaccaggatcatccatccgaggagcagggggggcaggggtgagtaagaacaccacagagcttcctcccagaatgccagggacagggggccatgtgtgagggggacagtgcatggggacacctgggaggagtctccacgggccgagggaaggactgggctgtgagttccaggagcagggatgaaggtactcagagcggagcagaacacagagacccggaggtgctgggccaggtcttgtggggcctgtggccactgcaaggaatgggttcttgctccacagaggcaggagccatgagggggttttgagcagaggagtgacttgaacagaagatggttcgtggctactgtgttgagaacagactgaagggagggctaggggacaagactgtgccaggagcttaggacaggaggatggaggcttggaccaggtggctttgtggaggttgagaagctgctggtttatcagtgtgttctgctagagctgacggggctccaggcagcctgcatctgtggcaagagcacagccctcgtggcagggcctgggagccccagaggtgtgagaggaggggtccgggggtgagccctggtgcctccactggggagcatggagtagggtggggacgttgtagccagcaggtggagggaagcctggagaggtgagtaggcgagggatgcgtgtcccggacaggagtgatgagctagcccaggtgcagctgcagacccagcgagtgaggaccaagacagacagctgggctagtggcctgctggactagtgggctgctgggctagtgacttgctgggttagtggcctgctggactagtgacttgctggtttagtggcctgctgggttagtggttgttggtgaccttgagagattcctaagttcagctgaaaggaggatttaaaataatgtgggccaggcttggtggctcatgattgtaatcccagcactttgggaggccgaggcaggaggattgctcaagctcaggagttcgagaccagcctgggcaacatagcaagaccctgtctctactaaaaatacaaaaattagctgggtttggtggtacaagcctgtagttctagctacttgggacactgaggtgggaagattggttgagcccaggaggtttaggctgcagtgagctgtgattgtgccactgcactccagcctgggtgacagcaagaccttgtctcaaaaaaaaaaaaaatgacaaagataaacatagtatgatctaaagttttttagttttttaccttaataaaaatggatacctataggattagaatacagggtagtttccctctactttcaagaaaaaaaaaatttcccatacttttaagatacttttttagaaatgaagatgtcattaaactttagtagatttaaccaaaatgaggtttggtggcttatgggaagcactgactttgagccccagccctgtgtaaaggctcccacagccccctttcccactgtagctttgtggttaagggagcttaacatacccgtggtcacgaacacagagcatacagcactgcgaggtttcacagagagcctgctagaagagaccccatatcagacagctcctggagaacaggggatcctgacaggtagagagggaatggcgagaatatttcatgctgtgacccgcagatctggaagccacaggacttggcggttggcagatgttagggaacgtgggtctgcaggtctgagccctggtgcctggggaatgctggtgcggtggacagtgacaggtggtttccaggcacagcccacagcagaggaggagaggctgaggtgggctgtggaggtgccagtttttaaggttactgaaagtctacgcctagggctcaggaaagcagctggggaaggctcttggtttgctgctgtttgaggagagtcaaagctcagtgagtgtgaggaggaaggaatctacctagcagaggaggatctatcgaaggagaagagggtgggcgactgcacagagcctggggaggggcggtggctcaggacgctcgctgcctgaatctggaaagtgccacactgcaggcttcttctgggcccctcagaagacaggcacggacccctccttctcacaggtttgtgtgtgtggctgtcagaagacagcacacccctcctcctcgtgtgtgtgtgtttgctcatttaggcttgaattgtctcttcaaagatgtacaaaaactgagtcacattgtcacccacgaggaagggagctggctggctggggagcaggggtgagaggagcttttcagtgtacagccaaatttgacttcttttaaaatactgaaccacatgaatgtggttacctattcaaagaaccaaaagaatactaccatttaaaaattttaaaataagtattctagctagttattaagtaggataaaatatggggcagcacgttgaatttagtacgttcccatatgtttaaatgtgtgtatgtgtccatgtgttttagatagaaaggcatagaaggcaataatttcttttttatgcaaagaatatttctagaagtgggcccaaactggtaacaggggtggtctttgggaagatggccccagagactgggtcaggggaagcaggaaactggcttgtcactttctgtcctttggtcctgtttgaagtgggcagcagtgagtatggaaggcaaaccatcttggtgaagagtgaaggcctgcctggtcccatgtcagtcatgcactgtgtgcttgcccatcatccttgtcggaaggaacagagttgatgggctgcctggggcatcttaaatgtcataagctctacgtgggtctgactccacggccacaggcacttcacggtcatttattgcctgccttcctcttccacttgggcagttcctgtagagagccaggtgttaacccctgcctctcccgtctaggacgcctccagcagaagatgctgcttgcctgcagagcccccagcctgaggacacgggtgcagaaggaggggctgagtccaagacgagctcagaaaaccagaagcctggtgggtacttggtattcaaaagatggttaagttcaaatcgttaatgtctggaaaattgctaatgtttagactttctactttgagatgaaatgtagagaagatgacataaactgatatcacctaactgttcttatttttgacaggtcagcccccagtgttttgtttttgtagtttgaggtctaacttccatccagtgatgcgcacagatgttaagtgaacagctcagcagagtgtgtgtgtgtgtgtgtgtgtgtgtgtgtgtgtgtgtgtgcgtgtgaaccacacccacatcgagctgttgaacatttccaggaccccagcagtctcctgtccggaaccctcctgactgaccattctgatttctgacaccatgagttttgctgacttggaagcatatagaatacattcttttattttaaacagagatggagtctcactgtgtggcccagactgattttgaactcctggcctcaagtgatccttctgccttggcctctaagagtgttgggattataggcgtgagccactgtgccccgcctatagtatatgttcttgtggcttccttcagtcaacattatgtgtgtgaaattaatctgtatgattgcaagtggaggcattttttcttaatcttggaaagtatttgcatattgcatggctctctccagactttacatctaggctcacttttattgcacagcgcctcagcaaagaggaggagctggcgttaatagagttggctgacctcggccaggctaattgcacggacttagcagacatttctgacgtgtatgaacttggcactgagttaggtgccataaagaaaaaagataattagctgggcatggtgggggggcacctgtaattccagctactcaagaggctaaggtgggaggatcaattgaacccgggaggcagaggttgcagtgagccaagatcacaccactgcactccagcctggatgacagattgagactataaaaaacaaaaaacaaaaacaaaaacaaaactggttgggcacggtggctcatgcctatgatcccaacactttggggggctgaggcaggcaaatcacttgaggtcaggagtttgagaccagcctggccaacatgttggaaccccatctctactaaaaacacaaaaatattagccagctgtggtggcgcacgcctgtagtccctactacttgggaggctgaggcaatagaatctcttgaatccaggaggcggaggttgcagtgagccaagattgtaccactgcactcttgcctgggcaacagaatgagactccgtctcaaaataaataaataaacaaataatagataaacggggctgggtgcggtgtctcacgcctgtaatcccagcactttgggaggccaggacgggcagatcgtgaggtcaggagatcgagaccatcgtggctaacacggtgaaaccccgtctctactaaaaatacaaaaaattagccaggcgtggtggtgggcacctgtagtcccagctactcgggaggctgaggcaggagaagggtgtgaaccctggaggcagagcttgcagtgagccaagatcgcgccactgcactccagcctgggtgacagagcgagactccatctcaaaaaaaaaaagataaatgggacaaaacccaagccccttgtggaaggagaattcagtgagggagaaggaaaggagaggtgaggagaccatttgccgtcactggaatttatcttcgtgtggccttttaattttgatattcactgtctttatgaaatggagttagatcattgctccttgtcttgacaaatcttagaaattgcccagacaacatatattgataaactcatcccatgactagacaaagtctccaacactccagtgctgggagctccagctttccacactgcagatgttctgcacctctgctgtggtccctcattccgcttcccaggagggcgggataagatcctgggagggtggaccctgcatggctctgctccctttgatatgcatccgagacagtgaaacccacagataacacagctgaggtgctgagagccccagagggtggtttgctccctgacaggttcattcctcattgaggatggagagtgtgggaggaggagccgcagaggtggctcctgtgacgaaggcagccttgcccactgcctgtgtgattcccatgcatctctgggtatgttctggaagttgtttcctaaggaaattcttccagccatttccccacacagcttttttttggggggtgggaggggattgttgtgaaggatgggggtcatctggaaggatgggtttagacgcatttcattattgccgtggtccaaacccaggttcttcatcacagtcccatgtgctgctcttgctggccgtgactgtggctggtgaggtgagaggtgcaggtgaggagaaaggatcttccggagccgagtggtacgtgggggactgaatgtagctgttaaaatgcacatacacgttctcttcataaagtttgcccctggatttggccacagcggggggcagctggtttcgctgtgtgggaaccactggaaaagggttctgaagagttctggaaaagacagtttgcaaggccagctggtcagaggaacagggtcattgggacaacagttgtcattaagaggattttcccagagcagtgtttattccacggtagcagaccgggatccagtagactgcagagtggggctgaagagggtctgcactgtcgcaggccctgctaccggcccatttgcactttgcatagagcctggtgtggggccctcgggggacgtcagggcagccaggtgggtcccccaaaccatagcccttggaggacatgcagttgtttactgagctctactgggaagctctggctattagatgtccactgcagccaccaggcacttggccaccttcctggaagagccgttgtctcagctggaagagacttcatctctgggctcctgctcaggttcaggcaggtgaaggaaaacgtcatgcactttcttcatggttcttcttgccttggcttcccgcagggtttctggtatttggacagtcagtgtctccatgtggctagaaaagtatgatgcatccattgtgctgccacacgctggtgaggggcaaggcctgagcttcagaggctcatcacagttagggcagcattcctccgcaggatctgccagccctgctgcagctggtcggtctcaggtggaccccgtgccctcctctgcagacgtgacacccgcatgccactgtgccaggcagggcttctggaggacgcaggtgtggggttgtttgtgttgcatgtggcccggctcgggggctgctgcctgctcttgccctcctagctgtagctgtgctctgtgcaagcaaacacgatctcgggaccctaaactccctctgccaaaggggaagttacacgctggacctgggtctaagcctgtctgcttttgttcgcaagcagacagctgtcgcttcatagccctgggtcgtagccccgtgtcctgttatgtctcctgtcacatgtcactttatcttgtgtaaagctagctttcctgagctcgaggggatgcgtgattgtctttgtcctgccccaccccccgccgccctttcttcctccagcttgctctcccttttagacacagatgtttaggaagcccctttggaaaagcagaggccatggcgctcctgtgatttgtgtttcccggggcacatcctcaactttggataaatcaacctcgagtcggctgagactccctcagtccctttttggttgacggctccgaggaggaacctggccgcttgctcccagaagcggtgtcttgttcttgttcgcgttcagtggcaggactgcctccttcgcaccctagcttcacggctctgtctttaggatcagtcccagctctgtgatcaggccaggccaccccgggtttcctctgctcgcctcctctcagaagggcttggggattgtgctctccaaggttcttgacgtcactgggtcagtgcactcttttcctgaggccactcgatggcaggcggcatgtgacaccgaggatggcgctttctcagcaggagtctgtttgtttctttgccattgttttctataccatgaataaaccacagagggtggatctgttttccgtctcaggctactgtgattccagcagctgtgaacattcttactccggtgtttggatggaagccttgcctgttggagattgagaagttcacattgcgttgtttgagaatatgtcatgtccagcactggctcctcgtgcgtgctggccgctgtccttagggcatcctggcaggtcaaacagctccagagaagcctgcatgtttgtatccaaggccagccactgcaatgaggttctttttcaaatgagtgacttcacttcctggtcattgaattttaatacttgtcaaaggctgtttttattttaaaataaaattttaggccaggcacagtggcttaagcctgtaatcccaccactttgggaggccgaggcaggtagatcacctgaggtcaggagtccgagaccagcctgaccaacatggtgaaactccattcctactaaaaatacaatattagccgagtgtggtggcgcatgcttgtaatcccagctacttggtaggctgaggcaggagaatcgcttgaactcgaaggcagaggttgcagtgagtcaagatcataccattgcactccagcctgggcaacaagaacgaaactccatctcaaaaataaaaattttaaaattttgtttacctatgtgatggttttaattttttctaactgttctttgcagctagatactagggttactcaatttacacttttatgtgattcctcatctagacgttgcataaggtacaaaaaagtatatatatatgtgtgtacatgatggagttacatataaataacctgtaggaaaatatgaccttgattttgtgcagaaactttatctggaaacactgaaggtgccttcattagcagaactgcacagccgcctctgaaaaggtacgtccactcggcatggaggagtcggcgtcccttacccagttaataagatcaatgaatgcgcaggtctttcttcttctagcttccacccacaaataaaatggttccaaaaagaagatgtcgtcatcttaaagataagaataaggaatgtaaaggactacaagtgtcagtatttaagggatagagtcgttttcaggtaggtttatgtatagtcatataaagtaaaatagaaataatttttagcattttaaaaggctgactttatttctttttataaacccagtgcttgggtgggagacaaattttacctggctgatctggagctgcggggcaacataaggaaagatgactgccaatgtgtgattagaaacgatgaacctgtaatcactctggccaaagagagaagggaggcatggtgtcacctactcagacagagggtgagttgggatgcactcagcgggtggtctttaccctgcgtgtgtcatattcacgcgctcactgtcagctgttctcttgaacagaaccccaacgtggcttttgattttgatcactgggaagactgtgaagaggacagccacttccccaagggtaaggcatagagcgcccactctccgaggggttgtaggttctgagggcagtgagggacaccatcacccacttaggaattcagccttggtggaagtggaccgttcatgtcaagccctgagaaatcagttttctctttgtttatcttggtgctaaacgttctggtttgagtacttttcaacccttggtgataaacacaccttttaataacacactacagatattcttcctagaagaataaattatttgtaagcagaccaatttgacctgctcatttcttacctaaaataatgaaaatataagatacatagagctggaacccaaggcatttttttctgcattgacccaaataatggggggaaataaagatttgctgattagtctacacttatttgttataatatcttactcctttagtagtgaattctaaaaacctgccgtacacagtgacagaggtggttgaagacagtagcagcacttcagaggatgacgacagtgagagtgaaagagaaggtgaatgacgtcctcaagagcggctggaagatgttgaacaaaaatggatattgccatgtgaccgacagttaagaaaacagtcagtcataaccaaatctttttcttttcttttctttttttttttttttttttttttttgagacagagtcttgctctgtcggccaggctggagtgcagtggcatgatcttggctcactgcaacctctgcctcacaggctcaagcaattctcctgcctcagcctcccgagtagctgggattacaggcatgtgccaccatgcctgaccaatttttgtatttttagtagagacagggtttcaccatgttggacaggctggtctcgaactcctgacctcaggtaatcctcccacctcagcctcccaaagtgctgggattacaggtgtgagccaccacacccggccaaccaaatctttctttacctcaaggataaatgattactgtcaccttgtggtgctggacttgataacggtgagaaattcttcattgacttaaaaataggctgatgataagaccatcaaaggagggtggacacagagaaacagcaggtgtggtctgattccgccggcttgtctgtcctgtctggcgcctctcgccactcaccctggcagagcagacatgcatctgggtgatgaaatgcactgtctggagtcagtccattcattttttttcacctagacctttgctacattgctacaaacctgatcttacacatataaattgaggtttctaatgtacacacttagactcagcaactgttgaaccagccctttcaaccatgagatagtgggatttaacataaccatctatgtgaattgatagtgttagcattcttggatagtgatagctcctcagagtaagttgacttctgatgaagagatagtccagggatagaaattggattgctcagtaagacccaggcctttccggggtgaagctgctggttctaaacaatcccttggacctgcagagtcctgagcaaatggcacaaaggttgctttttagtggaaattcacaagggcctgtggggtgcctggaggtgatctttgaatgcctacatgtcgtgagccctgcagacattcgccaccccatctgcattgtggctgcagcactggggggggtcaccaggtttaggggaggagtgtatgtagtcatggccacacccagaggctggcttttgtgctttgggtttctttgttgactgaaaaagcgagaaaggtgagctattgggaaattaaaagtcctgtgcactctgtgtcttgtttatcagctttgcctcggaatggaaaagaatttggatagaacatgagtgttgtgtgacggccccaagatctttattatttttttgtatcagaaagcgccaatgcccaggcttatgtatgtcccagcagaagccaccgcttgaactagaggtgaactttgtcatcaagctgtcctgtgagcaggtctggatcacactctggctcagttttctcatctgtaaaatgagacatcccctcattgtgtggcctggccttgtctcagggagcgcccgccgagtgctgctgggttgggcagtttttctgcccagtggctctgatgggggctcagagccctggcctcccctgggaggacacgctgtgcagccaggacagctgccgggagtgtgcccaggtcactgctatggccttcgcagggtgactggcaggtatcaaatcagcccatgaaggaagatggtgattttccttttttgtagctaaattgggcaggctcttgggaagtagaaagttctggtgtttttgctggtgaaggttttgactgtggagctcttctaacacccatatcagtgtctgtttctctgcatgtggctgctgccctgttggtggagctctgggggcagagaccaggccgccgtccagtggcgccccgtgcgcaccagctgcctgctgtttacacccaggtgcgccgagtctctttcatacagcacagcaaatgataatagctagtgacaatgtgtttcctgtgcactcgtgaaaatgcagggaggacaactgcatgcttagatctgtttcttttttcagacattcaaatgttctaatatctgaagctaacattttgtaggatataggatgctgattatgtgaacaattagtcattggttttctgtactgctatgaatatgtctgatttcaagttttggtcaaatatctaaaatgcaaggtgaaagtgcctttgtctctatgcttctaaaatcgctcatgcttagttgtggtatggatgtcttccgcagtgtatcatcaataaaatttcactgttttcacagaaatgttgctttttacattttttaaacagtactttccctgaatgccaaacacagaataaaactttactcaccacactttctggtttgactaaaacgcccgtgaaggctgctagggagccagcgatgctgactggcaatgcaggcgaccctcgtgatgagcacaccggctgtggagggttctggatggaggctcagctcttgccattcatcctggcagatagatagatacatggcacgcacatcacaggttcagcacagggcgccagtactttacttttagggtaggggagagtgggtgagaaacatttgtactttaatatttttgtatatttatttactttttgagttggggtctctgtcatccaggctggagtgcagtggcatgatgatggctcactacaccctggactccaggctcaggtgatcctcccacctcagcctcttgagtagctggggctacaggtgtgcaacacgatgcctggctaatttttttatgttttttatagattagatacatgattttgccatgttgcccaggctggtcttgaactcctggactcaagcgatctatccgccttggcctcccaaagtgctgagattataggcgtgagccaccacacctggccagtaatttactgttgttttaaaatctatagcaatcaatcaatcaatcaaagcaaaaatgtcatccattttatataagagaccttattgacattgagtttaaagaacacctttcatttaagtgtgatgtgccccttgttaaatagctgccactgtaatggaggcttttattcagcccttccctaagcatctgcctcttgtttgttaggtgacatctcacctgacaacaactttagcaaacaaacacttgccacttcccctttctagaacccccactcagagaactaagaatatctaaaaataacaatattttaaacatctgagtatattttattcgtaagaaaaaaaggaagaaataaccacaaatattgcttaagaaaataaattcagctgacttggctacaagagacggagcttgttactcagggtcttcctccggtgggaccacttccattagcatctgaaggtgcatggtaatcggctctgaaataagagtcaaaaatgagtacagttagttagactgaaattcgaaagtttcactggagttgttgtgggtgagggtgacattgttttcagtctttggtgatgcgtcacctagaccctgtgctcaggatggccagctttcctgccttctggttggatttcacactttcctggcttctgtcttctcccagaattgcaggaatagaaataaaaacctcctaggagtgtccggagggacgactgcactttccagttcagatgagctgaacaggagaaacaggcaggcttttaatcacattcacttaataaatcttaactggctgttacaggctgccgcagccagagttaaattgcacacagcccaagtcctgtcctcaaggagctcctggaagaggatgcccaggaagtcttaaaggcttttagaaatggggtttcctaggcaggcggatcacgaggtcaggagatcgagaatatcctggctaacacagtgaaaccccgtctctactaaaaatacaaaaaaaaaaaaaagaaagaaagaaatagggtttcctgcagttgaatctgttgtaaaggataaaacattgtgaatgtaatatagactttttgtttttgtgttttttgagatggactctcgctctgttgcccaggctggagtgcagtggggggatcttggcttaccgcaagctccgcctcccgagttcacgccattcttctgcctcagcctcctgagtagctgggactacaggcgcccgccaccacgcccggctaatttttttttgtatttttagtggagacggggtttcaccgtgttagccacgatggtctcgatctcctgacctcgtgatctgccccctcagcctcccaaagtgctgggattacagacatgagccaccgtgcccggcccgatatagacttttttaaaggtgtaattccgtctcttttgatgtactttgacacaagtgctttcttttcagaagcaaaagtggctactaacatagctaaacttttaaacaactgtcctaaaactgatgagggtcaggactgctgaaagagtgagccctgtgcccttggcattaaaaggcttgggccccagcccagttccccaggccaaggccatgactttttgtgtgtctttgcaatgctgctaggcctcttagatgatgtctgcatatcagacaaaggagaatggtgtttcaggatgagacgcatgatggtgggaatatgcctaatgctactgaactttacactgacaagtggctgagatagaaacgtttatgttgtgtgtctttcgcaattaaaaagaaaatggggctgggcgcagtggctcatgcctgtaatccctacatttcgggagactgatgcaggtggatcacctgaggtcaggagttcaagaccagcctggccaacatgatgaaaccccgactctactaaaaatacaaaacaacaacaaggaaattagccgggtgtggtggcaggcgcctgtaatcccaactactcaggaggctgaggcaggaaaatcgcttgaacgtgggaggcagaggttgcagtgagccgagatcgtgccagtgcattccagcctggacaacaagagcaaaactccatctcaaaacaaagaaaatgggccgggcgcagtggctgacatctgtaatcccagcactttgggaggccgaggtgggtggatcacctaaggtcaggagttggagaccagcctggccaacatggtaaaacctcatctgtactaaaaatacaaaaattagctgggcgtggtggtgcacacctgtaatcccagctactcggaaggctgaggcacaagaatcgcttgaaccgggaggtggaggttgcacagtgagctgagaccgcaccactgcactccagcctgggcaacagagtgagactgtgtctcaaaaaaaaaaaaaaaaagaaagaaagaaagaaaaagaaaaacggccaggtacggtggcttaggccagtagtcccagcactttggagagccaaggtggaagggtcatttgagcccaggagttcaagaccagtctgggccacctagcgagactccttctctacaaaaagtaaaaaaaatagccaggtgtagtgtgtgcctgtggtcccagctacttgggaggcccaggtgggaggatggcttgagcccgggagttcaagactgcagtgagctatgaccatgccactgcactttagcctgggcaacagagcaagactgtgtctccaaaaagaaaagaaaatggtgctttcccttcctacttattacagtaattgacaggaacaaaacaatcaagggtggacccagaggtgtacagtgagggcgtgggcatgtgtcctcctgggacgagggagatctgccagcagggtgagacactgtgacagaggtcttggagtcaggacaggtgaggacgccgtgcctgcctgcacctcacagaggccaagcggcccttctgttggtacttacttgagattttctgagcccatccaaacttgtagtggacaaacaggaagtaaaataaaaggccgcttaatataaacagcacacagtagaggtactcccaggtgggcttgctgatgattggagccagaaccaaaaacacagagatgagtgtcatcaagacgggaatgactacgggcacctggagacgaaaaacaggtcatgggtacccattttctttttgaaatttttcatgataaaaaaccgatttttataaaaagagtatgaactccatgtaccccctcctccaatttcaatcattttaatgtaattttgccaatcttatttcatctataccttttaaaaattttctttactttttaaaaagttttttggccgggcatgggtgctcacacctgtaatcccagcacttagggaggccgaggccggtgggtcccttgaggtcaggagctcaagaccagcctggccaacatagtgaaacaccatctctaccaaaaacacaaaagttagctgggcgtggtggcaggtgcctgtaatcccagctcctcaggagctgaggcaggagagtcgcttgaacccaggaggcagaggttgcagtgagccgagattgcaccattgcactctagcctgggccacgggagggaaactccatctcaaaaaagaaaaaaaaaaatagataaactgtttaatgttttagcatccactgatgatcgttgccttcattgtttcatcagggtttgcaaaatggtgatttttctaatttgtaatttcttcctcaattatctgaaatgctatatgaagtacttcaactttctggttattctgaattgcagttcatacaggaaaggcaggattagtgctgtattctgtgtgtttccagaatgacaagttgggcccctgagacctccaaaggcaactccagcctgtgggtttttctatacatggtgagtttcaacccgttgtagtcattgttcacgttgttcagaaggtcctgtgcggggcggcaggaacccctcacactgtcctgggccctgggaatgggacgccagtgctcttcaaaagcctctttgttttctgggtgacaagaagtgccatacctgggttttcatttatctctccagagccagacgtgggttttcatccatttctccagagagctttgtttccttttagcaggaaatggcatttaaagaccataacctggaggctggctgcagtggttcgctcctgtaatcccagcactttgggaggctgaggcaggcagatcacttgagtctaggagttcaagatcagcctggccaacatggtgaaaccccgtctctactaaaaatacaaaaattagccgggcgtgatggcagatgcctgtaatcccagcaacttgggaagctgaagcaggagagtcgcttgaacccgggaggcggaggctgcagtgagcaaagaatgtgccactgcactccagcccaggagacagagtgagactctaaaaataaataaagaccataacctgggtgattggagtactcattatcctttttcaaggacagagattaattttggtattctcttattaggaacaaagttaagtttgctgggattgttttgttttcatttttaagtgtcattgcatttttcctttgactgtgtttttttgtttgttttgtttcccaagacagagtctcgctctgtcgctcaggctggagtgcagtggcgtgatcttggctcactgcaacctctgcctcttgggttcaaacagttctcctgcctcagcctcccaagtagctgggattacaggcgtgtgccaacatgcccagctaattttttatttttagtagagacagggtttcaccacgttggccaggctggtctcgaactcctgacctcaaatgatctgcccatcttggcctcccagagcgctgggattacaggcatgagccaatcacacccagcccctgaattaaacttttaattaatggattttcggtcttcagctacctttgcataggctggacctagtcatgatatattatctttttagtgtaactgggttctgtttgttaacattttattttagattttttatatcgttattcctaagtgagattggtgagtacatttcccttttttgtgtgaagttacctttgtaaggtttggtgtcaatgttacagtctaaaaataatttgaaaaatcaataaaatcaatagctaaccttaaaaaggagaaagcacaaacacaaataaaaaataaaaatgggcaattaatctttacaacataagttatgttctaaagattaatacaaatcataagactattttgtacaactctatacagataaatttgaatacatggaagaaatgaacaattttctaggaaaatgtaatttactaaaactgatcttagttgcattagaatcacagggaaattctaaaaatcagacaattccagtattgcttaatttattccagagcattgaaaaaggaggaaaactttcaaaaagactgattattattcactcattcattcatttctgttttttctaacaccttaagtttttttctgcttattagttccttctgttttcttttggttttctgttgttctttatcttgcttttggagttgtctatttaatttgttttcatttttattgatatatttaatgtaatggagcttcctcaaagcactatttaagctgtgttcatagattatatgtcctgtcatcattactgctatttctaggaatttatgtactgtgtgtgtgtgtgtgtgtgtatgtgtgtgtgtgtgtgtgtgtgtgtccgagtctcactttgtcacccaggctggagtgcagtggcacaatctcggctcactgcaacctctgcctcccaggttcaagtgattctcagcctcagcctcccgagtagctggaactacaggtgcccgccaccacgcccggctaattttttgtatttttagtagagacagggtttcaccatgttggctaggatggtctcgatctcctgaccttgtgatccgccggcctcagcctcccaacatgctgggattacaggtgtgagccaccacacccggcctaatttttgtatttttagtagagatggggtttcaccatgtttgccaggctggtcttgaactcctgacctcaagtgatgcaaccgccttggcctcccaaaatgctgggattacaggcgtgagccactgcgcccggccagaatttatgtacttttatcttctatttctattaatatttcctcttggacccaaaagtttaacttttttcttttatcaatttcctgttttgtttcattaaagagagagaatgttatttgctttttggttgttttgatttctggggttttctttttgaaatatcaaggttttcttcatggcattaaaagctgtcagttttcagacaggtcccatttgcaactgaaaaaggtatactcgctgttgctggggttcggggcttgatacaaacctctaagatctatcttgctatattttagatccccagtcacttttaccagtgctgcgtccagatctgtcttggcctgaaggaggtgttttccagtcacctgttattaacgtgtttctccctccgtggatttcctgcagtttctgcttcgtaaagatggttgctatatggtttggtgaataggttttcaaaacttacctcttcattgtggattttagcctttagcatggcctgtctttgtcttaaataatgctttgggcctgagcacttgtctgataagatcacagcccctgtttttctgtatattcatttgcttgatatttctctgcctgttcttttaatttttcacagctttgaagatccgcctgaaaaatcttttactttcaatggctgatgtaagtccaatttaaatggagtaagcccgtttattcatataatgataagtctggtctccattctctcgtgttgttttatctttctgtatacaagcatcctctactcactgtcagtcttgcgtcctcgaagagtgatgttctatggaagaaccccccaggcctgtgtcccttcttttaaattcaccataggaaacctcaaatttcctgccaggtgctgtggctcacacctgtaatcccagtactttgggaggccaaggcaggaagataacttgagccaggagttcaagaccagtctggcccacatggcgaaaccccatgtctacaaaaaatacaaaaattagccaggtgtggtggcgtgcacctgtggtcccagctatttgggaggctgaggtgggaggatcgcttgagcctgggaggcacggttgcagtgagttgtaatcacaccactgcactccagcctgggtgacagaggagattccatctcaaaaaaaaaaaaaaaaaaaaaaaaaagaaacctcaaattcccaaccaaaaaacagtaaatgtgcatataaataacatgttacccaacacagattacattagatggtaaactgtgtttaaaataatttttggtgaccaaacagttaacatggttgttgaccaatgactgcctttaatgcaataacatggtctcgcaagacgtgagacgcttacacctcacactgtcagtacgcctacacgtggctttcagtacgcctacacgtgattttgatgtgtgttgaatttggaatgtaacttgaaacttttatcacacattttgtcaaaagtttatactacattttggggattcagatactgatttttccatataaatatcagctggaaatgaaagcatttagagatgcatggattctatagttcagggtgttaaaagctaataagcaaaaaatagcaatgacaaaaaatcctaataagcagtctacaagaaaacatcaaccaggaaggtattctgagggagatctgccagcagggtgagacactgtgacagaggtcttggagtcaggacaggtgaggacgccgtgcctgcctgcacctcacagaagccaagcggcccttctgttggtacttacttgagattttctgagcccatccaaacttgtagtggacaaacaggaagtaaaataaaaggccgcttaatataaacaaggctttataggtagggtcctttacagtatggtctgttttgtttccctcctttgtttaaatgttaaattttaattatttcatgtattctaagcacacttcctcttttttaatgtgtcttttggtaggtatgaaggatgtgtttttgttctgagagttactgtaactattatagctaatatattataactaatatattttaaaggggactaagggcattattatataaggatatattctgtataatatatgtgtatattatataagaatatattatatctaataggcacaatctatacatatataataggcataatatacatatatttaatgctatatatatttgttgtatatatgttatatattatgtatatatacatatcatgtgtatataaaaacgtatattatacatatacctataatatatacttatatacaacatatttatatcttatatccttatataatacccttagtccccttttaaagatattatatatgtatatatgtacttatatgtatatgtatttgtatgtataacagacatgtaatgatacacatatacatatatacatatatgcacatatatacatatacaaatatatacatatatatctattatacacatatattacatatattatacattatacacatatatagtacacatatatgtatatattatgtataatgcccttagtccccttttaaagatatgaattatattattaactgagcatataatacccttagtttcttctttttttagacattgtgtataataagcaataatgaagttagctaggtgttctcttcctcccagcatctaatttaaagtggcttccttattggcagcttgtctggcatactttcctcagttggcatatacttttccatgtgctttctctcgtccatgtttttgtatgatattgccagtgcataatagtggcatacacttctgtcccctttatctctcatcattaatcttagttctataatttgatatattcacctttgccagtgactttttggtttctgaagctcattctctgggtgattcctcaaggtctcatgtaattggcggggcacggtggctcacacctgtaatcccagcactttggaaggctgaagtgggtggatcacaaagtcaggagttcgagaccagcctgaccaacatggtgaaaccctgtctctactaaaaatataaaaattagccaggcgtggtggcacgcgcctataatcccagctacttagaaggctgacacaggagaattgcttgaacccaggaggcggaggttacagtgagctgagatggcgccactgcattccagcctggatgacagagtgacactccgtctcaaaaaaaaaaaaaaaaaaagtctcgtgtaaggatatttgccttgagttctttcatactagtgactgtagactttattctgcaaggtcagtttggctgggtataagaatctggcttacattttcctcctttgagtagtttaaatatgttgctccactctcttgcagcatgaagtgttggtggtgaaaagtttgaggccagaattatttcctttcctttataagtgaattgcagatgggagtgggaacaggaaaaggggaggggatgcccaaagcatttttttaaagctctgtaattttatcagcatatatttttgctgccaattttagctcaaaatttccagttacattgtatgcctttcagtatgttggttcaagatcaccctccatttttcctcccaccccaggaaatgtttcttgaattatggattttgggattctgttacttgcattttcttcttcagggactccaattatgcatgtattagattccccaccttccccacccctagtttttttctgtccccttgttttctctcaaaccctttctacttctgtctgatatttgttttcttccttttggccttctgtttcctagcatgtttctttgctcttatgttctttcttttctttttttctttgcaacggggtccctctctgttgcccaggctggagtgcagtggcacgatcttggctcactgcagccttgacctcctgggctcaagcattcctcccacctcagcctcccaaatagctgggactataggcgtgcaccaccacacccagctatctttttgtagagacagggtcttgctgttgcccaagctggtcttgaactcctgggatcaagtgatcttcctcccttggcctcccaaagtactgggattacaggtgtgagccaccacactcagcctctgtgttccttcttttccttcttgcccactctttatttctgaaatgatttttttccctaaaatgatgttttgaagtgctaatgggacatggcctctctgtggagccccttcccagttgagagatttgtatccacaggctccagctccttgaccctgatattcttgccaagttccatgtcctttctctcccagcagttgtttctcttgctgttgtcgtcagtgatccttatccttctggaaaggagtttttgtggggagtttctgggatcctcaagggcttaagccactgcagccctgctcctccacctcccctgggggtcctctgatcttcccactgagaacctcgttccacgtgcgccctctctcctgggaacacatggtgctggagtccagtggggcatccacttagagtctggagttggtggtaagacttcatttccttgatttgtgttgacaatgttggctgaagtgttttcctttggtatcctagaggctctgtctgtttctatgagggattttgtgcagattacaagtctatgctaccgtcataattttgcctgcaatgacttaaccaaggtggatctgccagactccaggcaggctgtgccatgactcagctgatgccagagacttgtccatagtcaagacacagggccagaaagaccactggatgtatctctgaaaacaaagtcctaaagctaaagacattgtccttattctcgtcctagttacttaagccctcagcttacctttttcttatgtctgttatcataagaattaaatagcaggttttttttaaagccccttaacataacaacaataaaattctacttcatccttattggtatatagatccacaccagccatgcagggagtgagagggagcccgaaacagatggcaagaatagactctgagtggttgcatgcacagcaatgagtctgcggctggagttcagaagttcccatcagtctatgaaaggaggccggcatagtggctcacacctgtaatcccaggactttgggaagccaaggtgggaggatcgcttgagcccaggagtttgtgaccagcctaggcaacacagtgagaccctgtctccaaagaaaaaaaaatgaaacaagaaaaatctatgaaaaatatatgtgcgagagatatcagaactgggctgggtgcagtagctgacacctgtaatcccagcactttgggaagccaaggcaggcagatcacttgaggtcaggagttagagaccagcccggccaacatggtaaaaccccatctctactaaaaatacaaaaattagccaggcgtgatggcagatgtctgtaatcccagcaacttgggaagctgaagcaggagagttgcctgaaccggggaggcagaggctgcagtgagccaaggatgcgccactgcactccagcccaggcgacaaagtgagactctgcctcaaaacaaatgagagccaggtggacctctttggttacagagacgggccacaggtattcgtgatgacttaataaaatgaataacaaggtggctaactggatcataaactatgctgtgaagagtaaactccactctaaaatacgatattttaaaagagtcaagtcagattggaactagaaggcatgcccctagcatttgaaagagttacatctaattcattaaaaaatccaaagccactcgtgactctggggctgcaagcttaccttgataggcctttccagctctttccttgtaaatctcatcacgatgagtcctagaatcgtcaggccataaaacagccatgcggcaaagctgaaataattgactaacgagtttatgtcaccagggatgatataaatcgttgctatgataccctaatagaaagaagaatggatttgtaggtcattactacaaaacactgttctcatgtcacagaagaccgaagaagcagtttttcttgtgaataaacactttagcatgaaacgaacttctaggcattccttcatagttggggttaaacctgactttggctatgatagctcttctctatgaagcttgcagaaaagacctgggaaatttctgaatctttgaggttgtgattttaagcaagggaaaaataaaatattaggttggtgcaaaagtaactgtgggtttttttgttttgttttgttttgttttgttttgtttgagatggagtctcactctgtcacccaggctcgaatgcagtggcgtgatctcggttgactgcaacctccgcctcccaagttcaagcgattctcctgcctcggcctcctgagtagctgagattataggcaggcaccaccacacccggctaatttttgtatttttagtgagatggggtttcgccatctcacggttttaatggtaaaaaaccgcaattacttttgcaccaacctaatatgtatgaatattataccagcttcataattaagaattttccacacagagagttttcaatgtgggctggggccctggattagaagctcaggtctagtcttggcctgtgttagttgtgtggccctggactggtatttcctgggtgtgttttcctgtcttcagaatgatagagagtagtggttctcctctgggggaaggagtgtagaccacccctggggctagaaatgtggatggtttatcagtgcccagaacagttgcacaaaacaagaaccatgcaccatggagaagctcccatgggcagatgtcaaaggggtggccaggcacggtggctcatgcttgtaatccagcagtttgggaggctggggtgggcaaatcacttgaggccaggagttcaagaccagcctggccagcatggtgaaaccccatctctactaaaaatacaaaaagtagccaggcgtgatggcaggccccttcaatcccagctactcggaaggctgaggcaggagaatcatttgaacctgggaggcggaggatgcagtgagccaagatcatggcactgcactccatccagcctgggtgacagagcaagactccgtatcaaaaaaaaagtcaaagggcgtttactgcacaaggatccggtgacttcttaatcattagagcataatgagaggcagctgtcagtaactacctgggaaaatgtcttgctctccttccctgtaagctagtgggcttttatatagagtttgttaccagggacccagcacagacaaatgcacacagaagcattgagggcatacactgtctttcgtggataaattcagacaaaggagcagatattgggtatgttgtttcacttgtcctgggactctttctatatctgtttcatagcaaggaataagggcatctgggtcatttggaagccgccgggcttagcaccccatggatggagtgtccccgccttgaagataggctggtagcgggatttgtactcacataaaagatgatggcgggggctggagtgaggcgcctgacgctgatgtaagaaagcactttgagcatgtgaccctcccggcccgccacgtaaatgagtctggaaaataacgacacgggagtccgctgaccagagtgcagaccatctgtccagggccactgaggacttgtgctccggggtccaccaaggagccctcgggaggctcaggaagggagctgagcagggacctgagcttcagatgggggtctgtcttcgggagacgagtgggttttggcagagtgagtgaggaggttaaacgcactgagagactaggtgtggtggctcacgcctgtaatcccaacaccttgggaggccaaggcagaggatcacttgagcccaggagttggagaccagcctggcaacatagtgagatcccatctctacaaataactttaaaaattttttaaatgtaccatttatttgtgttgggaacattcaatatcctcccctagctatctgaagctacatattaatattaatgtgagctctagccaccctgctgtgtgtagaacactagaacctgttcctcctgtctagctgtaattttgtatcctttagcaagtctctctctatctccctttccccccatgcttttcagcctctggtatcctctggctaaccagaatttcttgaaaaagttaccataattaaaaatttcggccaggcacagtggctcacacctgtaatcccagcactgggagactgaggcaggtggatcgcctgaagtcaggagttcgagaccagtctggccaacgtggtgaaaccctatgtctactaaaaatatgaaaaattagctgggcatggtggtgcacacctgtagtcccagctactcagggggctgaggcaggagaatcgctggaacctgggaggcagaggttgcggtgagctgagatcgcaccattgcagctaagatcgcaccattgcactccagactccagcctggacgacagagtgagaatccatctcaaaaaaaaaaaaaaaaaaaaaaaaaagccagatgtgatggcttacacctgtaatcccagcaatttgggagcccgaggcaggcggatcatgagattagaagttcaagaccagtctggccaacatggtgaaaccccatctctactaaaaatacaaaaaatcagctgggcatggtggtgggcgcctgtactctgagctgcttaggaggctgaggcaggagaatcgcttgaacccgggaggcagaggttgcagtaagccaagattgtgccactgtactccagcctgggtgacagagtgagattctatctcaaaaaaataaaaataaataagaggagaagatataaaaaacaggagcctgagctgggcatggtggctgtcgcctatactcccagcactttgggaggccgagacaggtggactgcttgagttcaggagttcaagaccagcctaaccaacatggggaaaccccgtctttactaaaaatacaaaaattagccaggtgtggtggcgggcacctgtaacctcagctgaggctgaggctgaggcaggagaatcacttgaacctgggaagcggaggttgcagtgagccgagatctcaccattgcactccagactccagcctgagcgacagaacaagactctgtctcaaacaaaaccaaacaaacaaaaaaacccaggagcccttgaaacatagcagacaaaaattggcaaatccaatttgagcacaagatttgaacattacaagttataatcttgatgatcatataaaaatctagatataattatggaatacacattatcttcaagaccacaggaaacataaaaatatcagtgagccacgaaggtcattttcaaacttctaaagaattgaggccaggcacagtggttcatgcctgtaatcccaggacttcgggaggccgaggcgggtggatcacttgaggtcaggagttcgagaccagcctggccaacatagtgaaaccccctctctcctaaaaacacaaaaattaggtgtgatggcaggtgcctataatcccatctacttgggaggctgaggcaggagaatcacttgaacctaggaggcagaagttgcagtgagccgagattgcaccactgtactctagcctggatgacagagtgagactctgtctcaaaaagataaataaataagaattgatgggggcatggagccaagatagccgaataggaacagctccggtctacagctcccagcgtgagcaacgcagaagacgggtgatttctgcatttccatctgaggtaccaggttcatctcactagggagtgccagacagtgggcgcaggacagtgggtgcagcacaccgtgcatgagccgaagcagggcaaggcattgcctcactcgggaagcacaaggggtcagggagttccctttcctagtcaaagaaaggggtgacagacggcacctggaaaattgggtcactcccaccctaatactgcgcttttccaacgggcttaaaaaacggtgcaccaggagattatatcccgcacctggctcggagggtcctacgcccacagagtctcactgatggctagcacagcagtctgagatcaaactgcaaggcggcagcgaggctgggggaggggcgcctgccattgcccaggcttgattaggtaaacaaagcagccaggaagctcgaactgggtggagcccaccacagctcaaggaggcctgcctgcctctgtaggctccacctctgggggcagggcacagacagacaaaaagacagcagtaacctctgcagacttaaatgtccctatctgacagctttgaagagagttgtggttctcccagcacacagctggagatctgagaatgggcagactgcctcctcaaatgggtccctgaccccccagcagcctaactgggaggcaaccccccagtaggggcagactgacacctcacatggccgggtactcctctgagacaaaaattccagaggaacaatcaggcagcagcatttgcaggtcaccaaaatccgctgttctacagccactgctgttctgcagccactgctgctgacacccaggcaaaaagggtctggagtagacctctagaaaactccagcagacctgcagctgagggtcctgtctgttagaaggaaaactaacaaacagaaaggacatccacaccaaaaacccatctgtacatcaccatcatcaaagaccaaaagtagataaaccacaaagatggggaaaaaacagagcagaaaaactggaaactctaaaaagcagagtgcctctcctcttccaaaggaatgcagctccctcaccagcaatggaacaaagctggacagagaatgactttgacgagttgagagaagaaggcttcagacggtccaactactccgagctacaggaggaaattcaaaccaatggcaaagaagttagaaactttgaaaaaaaattagacaaatggataactacaataaccaatgcagagaagtccttaaaggagctgatggagctgaaagccaaggctcgagaactacgtgaagaatgcagaagcctcaggagccgatgcgatcaactggaagaaacggtatcagtaatggaagatgaaatgaatgaaatgaagcgagaagggaagtttagagaaaaaagaataaaaagaaatgaacaaagcctccaagaaatatgggactatgtgaaaagaccaaatctacgtctgattggtgtacctgaaagtaacggggagaatggaaccaagttggaaaacactctgcagggtattatccaggagaacttccccaatctagcaaggcaggccaatattcagattcaggaaatacagagaatgccacaaagatactcctcgagaagggcaactccaagacacataattgtcagattcaccaaagttgaaatgaaggaaaaaatgctaagggcagccagagagaaaggctgggttacccacaaagggaagccggtcagactaacagcggatctcttggcagaaactctacaagccagaagagagtgggggccaacattcagcattcttaaagaaaagaattttcaacccagaatttcgtacccacccaagctaagcttcataagtgaaggagaaataaaatactttacagacaagcaaatgctgagagattttgtcaccaccaggcctgccctaaaagagctcctgaaggaagcactaaacatggaaaggaacaaccggtaccagccactgcaaaaacatgccaaaatgtaaagaccatcaaggctaggaagaaactgcatcaactaacgagcaaaataaccagctaacatcataatgacaggaccaaattcacacataacaatattaactttaaatgtaaatgggctaaatgctgcaattaaaagacacagactggcaaattggataaagagtcaagacccatcagtgtgctgtattcaggaaacctatctcacatgcagagacactcataggctcaaaataaagggatggaggaagatctaccaagcaaatggaaaacaaaaaaaggcaggggttgcaatcctagtctctgataaaacagactttaaaccaacaaagatcaaaagagacaaggccattacataatggtaaagggatcaattcaacaagaaaagctaattatcctaaatatatatgcacccaataacaggagcacccagattcataaagcaagtccttagtgacctacaaagagacttagactcccacacaataataatgggagactttaacaccccactgtcaacattagacagatcaacaagacagaaagttaacaagaatacccaggaattgaactcagctctgcaccaagtggacctaatagacatctacagaactctccaccccaaatcaacagaacatacatttttttcagcaccacaccacacctattccaaaattgaccacatagttggaagtaaagcactcctcagcaaatgtaaaaggacagaaattataacaaactgtctctcagaccacagtgcaatcaaactagaactcaggattaagaatctcactcaaaacagctcaactacatggaaactgaacaacctgctcctgaatgactactgggtacataactaaatgaaggcagaaataaagatgttctttgaaaccaacgagaacaaagacacaacataccagaatctctgggacacattcaaagcagtgtgtagagggaaatttatagcactaaatgcccacaagagaaagcaggaaagatccaaaattgacaacctaacatcacaattaaaagaactagaaaagcaagagcaaacacattcaaaagctagcagaaggcaagaaataactaaaaccagagcagaactgaaggaaatagagacacaaaaaacccttcaaaaaattaatgaatccaggagctggttttttgaaaggatcaacaaaattgatagactgctagcaagacaaagaagaaaagagataagaatcaaatagacacaataaaaaatgataaaggggatatcaccaccgatcccacagaaatacaaactaccatcagagaatactacaaacacctctatgcaaataaactagaaaatctagaagaaatggataaattcctggacacatacaccctcccaagactaaaccaggaagaagttgaatctctgaatagaccaataacaggctctgaaattgtggcaataatcaatagcttaccaaccaaaaaaagtccaggaccagatggattcacagccgaattctaccagaggtacaaggaggagctggtaccattccttctgaaactattccaatcaatagaaaaagagggaatcctccctaactcattttatgaggccagcatcatcctgataccaaagcctggcagagacacaaccaaaaaagagaattttagaccaatatccttgatgaacattgatgcaaaaatcctcaataaaatactggcaaaccgaatccagcagcacatcaaaaagcttatccaccatgatcaagtgggcttcatccctgggatgcaaggctggttcaacattcgcaaatcaataaatgtaatccagcatataaacagaaccaaagacaaaaaccacgtgattatctcaatagatgcagaaaaggcctttgacaaaattcaacaacccttcatgctaaaaactctcaataaattaggtattgatgggacgtatctcaaaataataagagctatctatgacacacccacagccaatatcatactgaatgggcaaaaactggaagcattccctttgaaaactggcacaagacaggggtgccctctctcaccattcctattcaacatagtgttggaagttctggccagggcaattaggcaggagaaggaaataaaagatattcaattaggaaaagaggaagtcaaattgtccctgtttgcagatgacatgattgtatatctagataaccccattgtctcagcccaaaatctccttaagctgataagcaacttcagcaaagtctcaggatacaaaatcaatgtacaaaaatcacaagcattcttatacaccaataacagacagagagccaaatcatgagtgaactcccattcacaattgcttcaaagagaataaaatacctaggaatccaacttacaagggatgtgaaggacctcttcaaggagaactacaaaccactgctcaatgaaattaaagaggatacaaacaaatggaagaacattccatgctcatgggtaggaagaatcaatattgtgaaaatggccatactgcccaaggtaatttatagattcagtgccatccccatcaagctaccaatgactttcttcacagaattggaaaaaactaaagttcatatgaaaccaaaaaagagcctgcattgccaagtcaatcctaagccaaaagaacaaagctggaggcatcactctacctgacttcaaactatactacaaggctacagtaaccaaaacagcatggtactggtaccaaaacagagagatacatcaatggaacagaacagagccctcagaaataatgctgcatatctacaaccatctgatctttgacaaacctgacaaaaacaagcaatggggaaaggattccctatttaataaatggtcctgggaaaactggctagccatatgtagaaagctgaaactggatcccttccttacaccttatacaaaaattaattcaagatggattaaagacttacatgttagacctaaaaccataaaaaccctagaagaaaacctaggcaataacattcaggacataggcatgggcaaggacttaatgtctaaaacaccaaaagcaatggcaacaaaagccaaaattgacaaatgggatctaattaaactaaagagcttctgcacagcaaaagcaactaccatcagagtgaacaggcaacctacaaaatgggagaaaattttcgcaacctactcatctgacaaagggctaatatccagaatctacaatgaactcaaacaaatttacaagaaaaaaacaaccccatcaaaaagtgggcaaaggatataaacagacacttctcaaaagaagacatttatgcagccaaaagacacatgaaaaaatgctcatcatcactggccatcagagaaatgcaaatcaaaaccacaatgagataccatctcacaccagttagaatggcgatcattaaaaagtcaggaaacaacaggtgctggagaggatgtggagaaataggaacacttttacactgttggtgggactgtaaactagttcaaccattgtggaagtcagtgtggcgattccttaggaatctagaactagaaataccatttgacccagccatcgcattactgggtatatacccaaaggattataaatcatgctgctataaaggcacatgcacacgtatgtttattgtggcactattcacaatagcaaagacttggaaccaacccaaatgtccaacaacaatagactggattaagaaaatgtggcacatatacaccatggaatactatgtagccataaaaaatgatgagttcatgtcctttgtagggacatggatgaaactggaaaccatcattctcagcaaactattgcaaggacaaaaaaccaaacaccgcatgttctcactcataggtgggaattgaacaatgagaacacatggacacaggaaggggaacatcacactccggggactgttgtggggtggggggagcggggagggatagcattaggagatatacctaacgttaaaatgacgagttaatgggtgcagcacaccaacatggcacatgtatacatatgtaacaaacctgcacattgtgcacatgtaccctaaaacttaaagtgtaataataataaaattaaaaaaaaagaagaattgatatcaggccagccactgtgccttacacctgtaatcccagcactttgggaggttgaagtgggtggattgcttgaggccgggagtttgagaccagcttgggcaacatagtaagacctcacatctacaaaaaacttaatattagccatgcatggtggcacgtgcctgtggtcccagctacttgagaggctgaggtgggaggatcacttaagcacagggaggggtctgaggctgcagtgagccatgattgcaccaccacactccagcctgggcgacagcgagaccctgtctcaaaacgacgaacaaaaaccctaaatcaagacttgatatcataaaggtcacatactctaattacagtgcagtaaaattagaagtcaatacaaatgccacaaagacccatctatttacaactacatatcttaactttgaattgatatgaacttgatattaattcccaaaagaagtgaaaccaggaggatgggagttgattaatggaagggagatttagacacaaggtgaatactgtcaaatctttttatcagtcctccagaaattaatatagaaattccataaaatcagaatgcaagcagtacttttggaaccggacaaaataattctaagtgtatagggaatgctaaacagacaaggagaagtctgacgtgggagcgttagtcctgccagattttacaagaccaaagctataaacttttttttttttttttttttttttgagagacggagtctcgctctgtcacccaggctggagtgcaatggtgcaatctcggctcactgcaacctccgtcccccaggttcaagccattctcctgcctcagcctcctgagtagctgggattataggcgcccaccacgtccggctaatttttgtacttttagtagagacagggtttcaccatgttggccaggctggtcttgaactcctgactttaagtgatccacccacttcggccttccaaagtgctgggattacaggcgtgagccaccacgcctggcccatgtcattccatttagatgaaatgtcaagaaaaagcagttatagagacagaagtagattagtggttgcctggagctgcgggtgaaagcagggattaattaggcaatgaggaaactttttggggtgatggaaatgatctagaattggattgtgatgtttgtacagccttataaatttatgaaaataattgagttgtataattacaaagggtgagttttatatttgtaccttaattagaactgttaaaattgtgtttgtgtatactagcaataaactatcagaaactaaaaattaagcaacttttttttaacagtaccatttacaatagtatgaaaaatgaaattctttggaataaatttgacaaaagatgtgcaagaactatataccaaaaactactcaaaaaacttttttttacagaaaattaagccaggcccagtggctcacgcctgtaatcccaacactttgggaggctgaggcaggtggatcacttgaggccaggagtttaagaccaacctgggcaacatggtgaaaccctgtctctactaaaaatacaaaaattagccaggtgtgatggtatatgcctgtaatcccagctacttgggaggctgaggcatgagaatcgcttgaacctgggaggcagatgttgcagtgagccaggatcgtgtcactgcattccagcctgggtgacaaagcaagatcctgtctcaaaaaaaaaaaaaaaaaaacaccaacaaacaaaaaagttgttaaaacaagattaaagacctaaatagtccacccatggattggaagactcagtattttttttttttttggagacaaggtctcactctgtctcccaggctggagtgcagtgcagtggtgcaatctcagctcactgcagcctcgacctcctgggctcacacgatcctcccacctcagtctcctgagtagctgggaccacaggcatgtgccaccatgcctggctaagtctattgtactttttgtagacatggggtctcactatgttgcctaggctggtctctaacccatgggctcaagcagtcctccccctcggcctcccaaagtgctttgattacaggtgtgagccaccgtacccatgctggaagactcagtacttttaagacagcagagtcttcccccagttgatctatggattcaacccagtcctgatcaaaatcccaacagctttactatagaaactggcaagctgattgtaatattcatatgcaagtgggaaagctgccagaatgaaattggacccttatctcaccccttagacaagaaatctactcaaaatggatataagacttgaaactgtaaaattcctaggagaaaacaggcaagctctgtaacattggtctgggcaatgattttttgttgttgttgtttttgagacggagtatctcactgtgtcgcccaggctggagtgcactggtgcgatctcggctcactgcaacctctgcttcccgggtcaagcaattctcctgcctcagcctcctgagtagctggaattacaggcatctgccaccatgccccactaatttttgtatttttagtagagacagggtttcaccatgttggccagtttggtctcgaactcctgacctcatgtgatccacccacctcggcctcccaaagtgctgggattacaggcgtgagccactgcacctggccttgggtatatatttgaatgaattgaaatcatatgccagatacctgcactcctatgtacctctgggtatatatttgaatgaattgaaatccacatgtcaggtgtctgcactcccatgttcattacaacgttattcaccacagccaagacatggacacaacctaagtgtccatcacagatgaatgaataaaaataatgtaatagatacacaatggaatactattccgactctaaagagaatggaattctgtcatcttttgacaacagagatgactctagagaacattatgctaagtgaaataagccagacacagaaagacaaatatcccatgatctcccttatgtattatggagtcctaattagggaaaatgagtcaggctggtgggaccaagggaaagccaaaagagataagacagataagctacaagcccgcctttcttcatggtccaggacacatagcccccctgcacaaataacttacaagcttcctgtgcccagtgatcgccagtccctcagctaatagaaaaatgcagccgggcgcggtggctcacgcctgtaatcccagcactttgggaggccaaggcgggcggatcacgaggtcaggagatcaagaccatcctggcaaacacggtgaaaccccatctctactaaaaatacaaaaaaaaattagccgggcgtgatggcaggcacctgtagtcccagctactcaggaggctgaggcaggagaatggcgtgaacctgggaggtggagcttgcagtgagccgagatcatgccactgcactccagcctgggtgacagagcaagactccgtctcaaaaaaaaaaatagaaaaatgcaagttagctcactgcaaccttggcattatcagtactgcacgtacccctgtccagcacacagcacaagcaccatcctacaaaatccccagcaagcctttgtctctttgcagtcagttcctctcttgctgacctgctcattgcacccttgcaatgtattttcctactttctgtaataaatctgcctttcctgacctacagctgtcttggtaaattcttcttatccctgtaccaccagcccagatagttgtaatcatctgcaacatacatgaaatctaaaaattcaaacatagcaatagagagtagaatgctggttaccagaggctgaaggaagaggggcctgggatggcaaaaggggaaatgttggtcaaaggctacagagtttcagtatgatgggaggaataagctctggtgatctactgcacagcaaggtgactattgttagtaatagtgtatatttcaaaatagctagtggtttttttttttttttctgagacggagtcttgctctgttgcccaggctggagtgcagtggcgtgatcttggctcactgtaagctctgcctcctgggttcacgccattctccttcctcagcctcccaagtagctaggactacaggcgcccgccaccacgcacagctaatttttggtaattttagtagagatagggtttcaccatgttaggcaagatggtctcgatctcctgacctcgtgatctgcccgcctcggcctcccaaagtgctgggattacaggcgtgagccaccatgcccagccagtgaatttttaatgttctcagcataaagaagtatgtgaggtgatacatatgccattccacaatgtttacatgtattgaaacatcacactgtaccacatacatatatgcaattattgttgttattttttagaggcagggtcttactctgttacccaggcaggagtgcagtggtgtgatcgtggcccactgcagcctggaacttctgggcttctggaactacaggcatgggcctctacacccagctaatttttaaatttctttttgtagagacggagtctcaccatgtggcccagactagtctcgaactcctggcctcaagcaatcctcctgcctcagcccatataagcaattattatttgtcaatttaaaataaggcggccgggtgtggtggctcacacctgtaatcccaacactttgggaggctgaggcaggtggatcacgaggtcaggagttcaagaccagcttggccaagatggtgaaactccgtctctactaaaaatacaaaaattagccaggcatgatggcaggtgcctgtaatcccagctactccagaggctgaggcagaaaattgcttgaactagggaggcggagactgcagtgaggcgagatcacaccactgcactccagcctgggtgacagagcaagactccatctcaaaaataatataaggctgggcacgatagctcatgcctgtaattccagggctttgggaagtggaggcaggaggatcacttgagccaggagttcgaaatgggcctgggcaacatggtgaaaccccatcttgactaagaatacaaaagttagctgggtgtgatggcacgtgcctgtggtcccagctattccagaggctgaggagggaggattgcttgagcccaggaggtagaggctacagtgagccaagatcatgccagtgtgctccagcctgggcgacagagtgagaccttgcctcaaaattaattagttaattaaaatttaaatttaaaatttataaagaaatacaaaggatctagccaaaacgcttttgacaaagaatgaagttggaggcctagcactacatgtatttcggtttggctttagaagaatgattttatggtatttcattttttaacatacacagactttgtcaatttcactctgaaatatatccattcagaacactggacaactaagccaagacacgtgttcgaggatgttcactgcggcaacgttcatggaaaccacccacacccaggtgtgagtgaaggatttgttaagttatgctacatctgaaagtgtgatacaacacagctggtggcagtctctagaccagatgggtctaaaggattggcaaaccacagctgtttgggcaaataaagttttattggaacatgaccatggctgttcactcttgggtaccaaggcagagttgagaatctgtgacagaggtttatgcagcctgcgagcctggaatatttaccatctggccctttaagggaaagttagccaattctgggttatttattaatttgctaattagcaaattagtttgtatatattaacatggggaagatgttcaggaaatatcactatgtgaaaaatatcactaggtgaaaaggtaaaaagtgccacgtggaaaaccagtgcctcattcacgcggtgtcgcttcccttcgcctcagcatgggcagcttcccccccatgttgggaactagggccccctggagtggaaaggctgagattccaggcagccttgatcaattcccgtgtgcaggcccatccatgccttcctggccagtttgcggtgtgggttcaagctacatcccttctctggatttgggtctcctacttgtactggcgtgggtttcgcctggcagaaccctgaggattttagctgtgtgtcttcctcgggggtgatattgctttcgccgcccctgtccaccctgggagtgacggtgggggtcccctacctgcccgctgtgaagcaggtcccgttagcagcaccgatggttgaaaatgccacaaaaagtggaacgatccaagaagcaggatagagaacacggtcaccaaatgtctggtgagagaagcgagatgagtcctgagggtctttcttggcctccaagagcggccggcccccaaaagctattctggcctcccaggggacccagggacccacctcgcctcggggcacagcctctgactcctccactgcagaggagagaggagaacgccactcgcctatctccagatattgtgatggcaagagaagtctcttatctactactccctggcataaatctttatttatttatttatttatttatttatttatttctgagatggagctttgctcttattgcccaggctggagtgcaatgttgctgtctcggctcactgcaacctctgcctcccagggtcaagcgatgctcgtgcctcagcctcccaagtagctgggattacaggcgcatgccaccacattcagctaatttttgtatttttagtagagacgggatttcaccacgttggccaggctggtctcaatctcctgaccttgcgatccacccatctcggcctcccaaagtgctgggattacaggcatgagccaccatgcctggccaaatctttattttttaatttgattttttttggagacaggatcttgctctgtcgcccaggctggagtgtagtggcgtgatcacgtctcactgtagcctcaatctcctgggctcaagtgatccttgcctcagtcttctaagtagctgagaccacaggcactcgccaccacacccagctgcgtaattcttggtcatttcaatatcctgacaccttcacctctcacttccctgaacccccactccaaccggaatggctgaattctccctcccacctcagcagcccccagtcttgtggtcagtgacctcaacacttatccaaactgcgtctcctccaccttccaaatccccaacacgtggttgtctgtttgcaactgcaggaggcccccagccacctcttcactgaccccaatgcctctcacctctcaccttctatgattcattattatttagggtggtgcaaaagtaattgccagttttgccaaaaatatatatattttttaatatataatgacctaatataatgacctcccccgactccctggcactttctgcctctgcttcatgcttgcctgccgaaccctcaccctggctagcccggccctgcctccagctccatgccgtgcgtgcccagtccatgtccccgtccgtgaatatcgccctccttccctgggagggagctcacctccagtgctgacacctgccttaccccttcccacaagccacagcccccgccagcagcgatgcccgggcactcaccacagccaccgcctgggactgcaggagttcggtggcagtcatcacggtgaagtaggacacgttcatgaggatgtagcacgccgtcaccagggggatcccgatgataatggccaaaggcaggtttctgggaggggcaatgacacggagacccacgttcagaccacagcctcccgcggaagatggacgccctccctgaggccctcccagggagaagattcgcaggtagcagaggcccagcaggaacataagacattttcaaatgagaatgctgcctctctcagactccagagcagttcacatggaactgtttataaagcaaaataagccagagataaaggaagaccaagctcttccctcccttaggagccactgctctgtcccaaaccaaaccaaactctaagcgtgcatagtgagctcataagaaaccattcgctggccgggtgcagtggctcacacctgtaatcccagcactttgggaggccgagatgggcgaatctcttgaggttgggagttcaagaccagcctggccaacatggcaaaatctcatctctactaaaaaaatacaaaaatgagtgagctgagattgcaccactgcactccagcctaggcaacagagcaagactctgtctcaaaaaaaaaaaaaaagaaataattcactgtcgggaagggcatcatggaatacccagggaaatagctccagccttcaccaggagaagagaaatcaggctgcccggctactgtcctctgcactgattcagctgttacctgtaagggtttctaagttcttctgtgatgtaattgagttgattcctggaaaaaggaaagtaacaagcgtcacacaccttgactttctttttcgataatgaaacccacaataataaatgttggcctcatttaagattctctaccagagaaaaaaattctcctgcaggaattccaggtgaatttttttccaggtgaatggccctgctagtggtggggcctggggccctacccagacctacacatctgtcagctggttgagcctttgccctcctcgggaatcacacggattttcaagaataatcaggagtagtgagtccccagggtgctttgaaaaaatggaatattctttgtctgaaaagggaattaaatctataaatgctttgcaggagagaaggaccatcgttgcagatggccatgcttcttccttaaaggacaaaaatgggccaggcatagtggcgcacgtctgtaatcccagcactttgagaagccgaggtgggcagatcacttgaagtcaggagttcaagactagcctggccaacatggtaaaacctcgtctctactaaaaatacaaaaattagccctgcatggtggcaggtgcctgtaatcccagctagtcgggaggctgaggcaggagaattgcttgaacctgggggattcaagcaattgcagtgagccgagatctcaccacagcactccagcctgggtaatagagtgagactccgtctcaaaaaaaaaagaaaaaaaaggacaaaaacagaatctcatccactaaactcgataaatatataaaatttatatggtattatttatttttgtagggcagtcccccaaaccataatagattcagagaggctcccaaacctaatgattttcaaggttaaatagaagtgctattgagtattctttgtttaatcaagagcttggggctgggcgcagtggctcacgcctgtaaacccagcactttgggaggccgaggagagagaattgcttgagtgtaggagtttgagagcagcttgggcaacacagagagactgtctctacaaagcataaaaataaaaaattatcagggcatggcagctcctatctgtagtcccagctactcaggaggctgaggcgggaagctgacttgagcccaggagctcaaggctgcagtgagctatgatcacgccattgcactccagcctgggtgaccaagtgagatcctgtcttaaaaaaacaaaacaaaacaaaacagaaaacctgagcttgggccctggctgcctctgatttggctgagcctgtgttggcccagtgagggttctacacagagcactctggctgactgagcaggtgtctcagggaataaaggggagaggttgtcgcatccttcacaaaaaggaaatgtgagggtgaatgtcagagtcacaccaaaccccagaaaggagaactcattgttttccatgacaggtggagttaaagtcacctggagaaccccacccacccccagactcgggacatctcaggacacctcaccatccatcataggcccagagtccattgtaaaacgccaggctgatggctcccacagacagctgggcgccctcgaaagaattatcaaaattctttgtgtttcctgtaatgaagccagacagtgaacggcgggtgtcaaccgggcagatcttgagtgtatctccacgggaaagatgggcatgattgtgaccccagcttaataaacacgccctgaaactaaggatccctcccaccgagttcctgccatgcttccttggagatgggctcgtggggcaaggctgctcctgctcccagtggaagggcgtttggtgtgtgcccgtgcagggcccaccctcccgtgggtcaccttgggccaggagcaccagcccgctgatgatgatgatggccacgatcaccagcttggccgcggtgaagatgttctggacgtagcttcccagccgcacgctcagtgagttcactgtcgagatgaacactggaagggtggggacagtttctgcatttatggttttcagcaaagccctggagagagtctcctttcttttatatattttttatttttttttttttttgagatggagtctcactctgtcacccaggctggagagcagtggcatgatctcagctcacgatctcagcaatctttgcctccccggttcaagcaattctcctgcctcagcctcctgagtagctaggacgacaggtgcacgccactatgcccagctaatttttgtatttttagtagagagcttgtctggaggttctagcgggggagcgcagctactcatatacccttgaccgaagaccagccctcctctatcggggatggtcatccttttccaccgagtgcgcagcttcgggagggatgcacgtggagcagtgagggaggaagaggacactggcctagccagccagatcacctgaatcaaccctggcgatcagtggggtgacagatgtccctgccagatcgccctcatatccaatttttgtaattttatttttatctatttatttatttgagatggagtctcactctgtcgtccaggctggagtgcaatggcacagtctcagctaaatgcaacctccacctcccgggttcaaggaattctcctgcctcagtctccccagtagctgggattacaggcatgcactaccccaccacccccctcccccgccctgctaatttttgtattttagtagaaacagggttttgccacgttggccaggctggtctcgaactcgtgacctcatgtaatccctccaccttggtctcccaaagtgctaggattacaggtgtgggccactgcacctagcctcttttattttttgagatagggtccaaggctcaagtgatcccccctcctcagcctcccacgtagctgggacgccaggtgcatgccaccatacccggctaatgttttgattgtttgtagagtcaaggttctcactgtgttgaccaggctgatctcaaactcttggcctcaagcgatcctcccacctcagcctcccaaagtggtgagattccaagcatgagccactgcctgcggcccacccctactcccccaccagccaccatatcatctcccaaattccaagagggcagatccaaacatgggagtttaaggaccttttaaaagaacctggagatgaccttagccgggctgcctcagatggcgaaaaattatcagggcgtggtaagcagcctcccgagtagctgggattacaggcacctgccaccacgccaggagaagctgggccctgagccaaggctctgccctgcaggacagccagcggcacccctccctgcagcccccacgggcctgggggtccccagtgtgcagcacccacaggtactgcaaaggctgatgccaggccctgcctgggctctcaccagagactcactggggaggagctgagggcggagtccccagacaccctctgtgccaggtcttttctgacccctgccctgggctcaggtactcacagatggcggcggcggccaggcatttcacaacgatttgaggaggcttgcagcccacatagaagggcgcacacacatactcggagaagctgaggcagatgatggcgaaggacgtgggcttaatgacgatcaggctggcccaggagaagaggtaggcggggatgggcccgtaggcctccatcaggtagggatactctccccctgacttggtgatcattgtgccaagctccgcaaagcacagggcacctggaacacagagaggaagggcccacaggccccttgtgaggcactgccccggccccagggagccttcctcccaccggaggctgcgctcgtatggaggggcccaccgtggtccgccctcgctggacggccctgagctccagcgttggacattcagtccagcctgatttacacctgtttgccatacatgtgccaagagggatactggcagggtgagggctggcacaggtagcagctgcctggcgtgcccctgcatgcttccggggctgcaacaggctcccaagtctctttacccagcgtcgcgaggaccccgcaagccgcccatatgatgaggcagggccccacagcttccgtgttgctgagcacagacttgggggaaacgaagatcccagagccaatgatggtgcccacgatgatggagatgccactgatgaggcccagctgggtgtggaggaaggaagagggcgttagtgccacgcccggacccagcccagaaggccaggtgccaccctccctcggtacggccagggcggccccagccaaagcccatgtcccaggcgcttccaccctgagcggctgccctggcaacaccggggcaccgctcccggagctttgcttatgttaacgtgattaattatcgtgacagccccgcgagctggccacactgtgtcacccccatggacagaggaggacgctgaggcacagaaagattaggaggctgtccggggtttacagctagagagggggaaacctggctcaggttccacgtgcctaaccgtgatcctgtgccctcaatgaaaaggctgacttggcaacagctcaccaataagaaaggccctcgggatacgcctctgagcctagagtcctggccagaggctccatgcagggtgagcaacggaggcctcccagaaacagaaacatttgggcactctgaactttctgtggtgccattttcttttatcttatttttatttacttatttatttagagtcagatctctctctgtcacccaggctggagcacagaggtgagatcatggctcactgcagcctcgaactcctgggctcaaacaatcctcccaactcagcctcccaaagtgctgggattgcaggcgtaagccgccgtgcctggcccagtgccatttgctaggatgggagctttctgagaacagaacccagctcaaagagacaccagatggttccatgcctgtgaagttcaagaacaggtgaaactaatccacagccacaggaattcagggctggggccctgcctagaaaggggcacgagggagctttctggggtggtacatctgtcaaaactcaccaaactcagcactaaagagctgtacatttcgaccaggtgcagtggtttatgcctgtaatcccagcactttgggaggccgaggcaggcggatcacctgaggttgggagtgggagaccagcctggccagcatggagaaaccccgtttctactaaaaaatacaaaaatcagccaggcattttggtgcacacctgttcctagctacttaggaggctgaggcaggagaatctcttgaacccatgaggcagaggttgcagtgagccactacaatcactccagcctgggtgacagtgagactgtctcaaaaaaaaaaaaaaaaacctgcacattacactgtatgtaaattacacaccaatcaaggaggaaaaaaaagtccaactcaagccctactcataacactcgtcctcagaagcagccccggccagatctccagagcctgaagtttccagcacccatgttcacctgtctgggaagaagctgggcttggagtcagatcgcaggggatgaggggctcccagctgcaggctgccaccctgaggactctgcacacaccagtgggatccctggggagcagcgtctgctttcagggccagggcgcacttccaggacagggcggggatgggctcagctctcctcctcatctcagccctgcccaggactggcagtttggctccagaatcctccctcctgctgagggactgcctgggttctgatgtgggtgaggtctgcattcgccctgaagctgcctgactgaggagtagacccagctcagatttttggtttttagagtcagggtctcgctctgtcacccaggcttggagtgcaatggcgcgatcatgactcactgcagcctcgatctcctgggctcaagggatcctcccacctcagcctcccaaagtgctaaggttacaggcgtgtgccgccacacctgtccccagctcagaagacacatcttggggatttctcagctgtgctctgtggccactggggcccaccagggttctaagaggcccttcctgagatcaggcctgagactggcagagagggaaagtgctgcagcccatcgtctacctcctgggggtcccaggccaagccattcaggccattgccagccctccggtcaagccctaaagccttggtgccgtccctcctccatcccctctgctgccaggcatgggagctctcggaggccctgcccacacctctgccctggaagcggaagccatcctgagctcacctggagctgcctttcctcatcctaggagcctgaagccctccctgcgcctccatgctcagcacctgctgctcccaactgcctgggactggcgcagtgtgctgtgttgagctcctttctgccttccccccagccccaagctccctttccctgcaggcccagggccagccccagctgctcactgcagcccaactcagagcagctgtccctggtagatgcctctaagacagaacaggctatgctgggggcagtacttcccatcactacagccattcagatataaggaggacaggcatttagaggggactcaaccatcagaacgccctctctggctgggcacagcgactcacgcctataatcccagcactttgggagcctgaggtgggaggatcgcttgagcccgggagttccagaccagcctgggcaacacagcaagatactgactctacagaaagaatttttttgaaaagttaaaaatttggcagagcatggtggtgtgctcctgtagtcccagctactcaggaggctgaggcaggaggattgcttgagtccaggaggttgacgctgcagtgagctatgattgcaccactgcactccagcctgggtgacagagtaagaccctgactctaaaaaaatttttttaaaaatttttaaaaagaacgccctttctgaccattcctggaaaggccattagtttgaacaaaaatactggcccgtctagacacttgctcaacacacaaaagcacctatttatgaacttaaaataatatgcgggccgggcaagttggctcatgcctgtaatcccaacactttgggaggccgaggtgggcggatcacttgaggccaggaattggagaccagcctggccaatatggtgaaacctcgtctctactgaaaatacaaaaattagccaggcgtagtggcacatgcctgtagtcccagctactcaggagctgcttgaacccaggaagcggaggttgcagtgagctgagatcataccactgcactccagcctgggtgacagagcaagactctgtctcaaaaaaaaaaaaaaaaaaaaaaaagaatatgcagccgagtgcagtggcacacgcctgtaatcccagcactttgggaggatcacctgaggccaagagtctgagaccagcctggccaacatggtgaaaccctgtctctactaaaaatacaaaaattagccgggtatggtggcgggtgcttgtaatcccagctactcgggaggctgagtcagaagaatcccttgaaccggggaggtgaaggttgcattgagccgagatggcagcactgcactctagcctgggtgacagagcaacactccatctcaaaaaaaaaaaaaaaaaaaagaagatgcagaattccctggcgagagggaaagagaagtaagtccagagattatccctttaaagatgtacttcacaaatcaaagagtacatcttctgccgtgtcactagggatcggcccggatttcactgcctgcgcccctcgttcagacgcccttgcctaacctgcaaagggcctgccccaccagagaccgccttacctccttttggagactggtggtcttaggctcttggctctggatcgacttctcatcctctctccgctttctcaggccagtatcccccatgtttcctcctgctggttccaggagactgcaaggagggcgcacagctaaatcttggttcagcagcagcagacaagacgcaagtgcaagctcggcctggactaggggagctggctgcaaaagcacagtgttggttattgctgcaggtgggggccgctgccagtccctcagggctcatgcgctgggccccagagtcaaagtcagtcattaacattgtccaggcaggggaacacagctccccgctgctctccaaagctcagctgcttgcttagctctctcccagacaggccccgggagcctcctggcccacgtgcctgtgccttgaaagtcattctacctctatggtcaacttcattttttttcaaaagtaaaaagaaatatttaacaacatcccgggctgggcacagtggctcaggtctgtaatcccagcactttcggaggccgaggtgggtggatcacttgagcccaggagtttgagaccagcctggctaacatggcgaaccccgtctctactaaaaatgcaaaaaaaaaaaaaaaaaaattagctgggtgtggtggtgggtgcctgttaatcccagctactcgggaggctgaggcaagagaagcacttgaaccctggaggcagaggctgcagtgagccaagatcatgccactgcactccagcctgggccacagagcgagattctgtttcaaaaaatatatatataaaaaattaaaaaatgaaaatattgtggaatgtatttatcagaatcaagtccaggtaaggagtgtctgtcttataattccttcccaagattaaaggcactcccatacatcacagatccacaatacaggtactttttctttgtactttttaaatttttacaatattttttataaagacgggagtgttgctatttgccccggctggcctcaagcagtccttccacctcggcctcccaaagggctgggatttcaggggtgagccaccacgcctggccaggtactttttcattgagtgatgaaaggaaagaaaacattgccgaggaaacccagttccagactgaactaggagaaaaccatgcactcctgtaccctctctctaaataaattatctgtccaggccccggccaggagagccatgagcctttctatcacctactgaccttacttaccttcctccgtgaccctgcagagccggaggagctgcggcccagctgaccgcccgtgcctgcacggtccaaccctagaaatggccatgtcttgtgcccaggagcaaaggaagtccagaaggtacagaggtcaataagggtaattattaaacacctttttttttttttttgcaatgaagcttagatacgccacacaaaaaaggggagggtcaggaacaccaatttctctccaaaaccgtttttgttttgttcatttgtgtctaggtcagattatttttttaaaaccagatggtcccaaatcgtctacactttttacctaaagataaaataaattatgccttcttttatctttgggaatcagaggagataaactttggaaccaattcgctaattgccttaataggctatatttaaaacccaagtcaggcagctcaaacaggaaccgctgtgtgtgcgtaactcagctgttggtcagtttcctccccgcccaggaatttcccccaagccaagggcctgcctctggctgagcaggtgagagcggctgagcccgtcccactcctctttaccagtgatggggcttcaccacttggaatcacaagcaggcctgaggcaatgcagggcctcgtgtcctccctgcagctgcggccaaatgcccatcaggtttggctgtggtgctgttcacgtagccatgtcctggctcatcacaagggacacaaaaccttccccttcggggaaacggagggggacaggcaacacaaggccaggaagctccggtccgcatccagggctgccagggtctggatctctctgggagggagcagaggttctcccgcactgcgattggacctaggctcaggcggcagcctcaggggtcagcacgaagccctttcagatagggaaggaagcaccttatgagaccttatgagacagcctggcacagcataagcactgcatctgaagcatcgtagctgttaccttcagccaaaactctggtagctttgccttgggccaaacttaactgcatcccagatatcagatggaagcaaaggtcagggatggaaggagctgggccagtctctgggggtcagtttgggagcagtttggggcaagcagacctgagagaggcacaggtttctctgaaagccgtctgcagagcacagggacccttgttgtcccagaggcacggtcctgatttagaagttcgtcacctcccatcttgggagggcccacctgtttacctgcctgccatgcccagagccctgagcagagaggctagtggcaggtcctgccaccctagacagaacctgcccaccggcttgctggggtcactcctcctaatgttgcagcactcatcatagtacctggcacatccatgtttgcaaaacaccacagaataccccctgggtcaaaagtgctcctggcaggctgacaggagaccacgtgaggacatcagggtggggcagtggtcccccgctggggccagacagccctgcaacctcacccactacccacatgggctcaggcagcactgccaggatcagggtctgaacctgcgacgcagggcgagcaacaggcgcctcctcacggaacacactgaacttgcatgttccatgaatgtccgggaccagccctctggtcttcctgggcctcttccaagtgccgagtctggaacatcgggatgtgagggtcctttgttaagtcagaaacctccacttcagttcattttgggtccacggtgagcatttcttaagcctgtttcttaaagttgtgtttttcaccgcagtcccaccctctccctcccttgaatacacagaaagtattcaagtaattctcataagctcttcctcatggaaaataatacggatttcatttaaaaagcaaaattttcctcagttcttgaagaccattggttcattgtgtatccagtgcttctgccatgtgactgaagtttcacctccctgctgtcaatttttttttttttagatggagcctcactctgtcgcccaggctggagtgcagtggcacgatctcagctcactgcaacctctgcctcctgggttcaagtgattctcctgtctcagcctcctgagtagctgggattacaggcatccaccaccatgcctggctaatttttgtatttttagtagagatggggtttcaccatgttggccaggttggtcttgaactcctgacctcaagtgatccacctgcctcggcctcccaaagcgcaaatcctactgtcatttttaccattttatttatttatttttgagacttgctgtgtcacccaggctggagtgcagtgtcatgatctcagctcactgcaacctccgcctcccaggttcaagcgattctcctccctcagcctcccgagtagctggtactacatgtgtgacaatatacccggctaatttttgtatttttagtagagacagggtttcatcatgttggccaggctgatcttgaactcctgacctcaagtaatccacccgcttcagcctcccaaagtgctgggattacaggtgtgagccaccacacccgcccaaccactctatttcttaagtttctgctaaagactcttgaccttcattttcaacccgtgctttttcccttccgattgcaaaaatgcttgcagtgtgaagatcttcacaccatctacattttatcttatatttggtgcacatttgatttcagttggggagggtaaaatgcttctctccacccttttgggttctttggttgggcttcgaattgagactaatgggaggaaaactgttttaattatgtgtatatgcaactgagtcccacaaaacaagagacttgaagaagggccagatgactaaaccctatatagcatcctgagctatataaggattaggggcttggggcttctggggcaggtagggactagtaatgggatggtgaggggaggaaatgcatggcgaataaaggtcgtcttgttatgcagatataagtctctcaggtaataaaagttgtctcttcctggtacagatacttgtactaatgtagatttccttcatgacatacatttcttttgcaaagggcagcttttcagagctacacctgttgtgtctgcagtttctcagaataaccagctcaaaatattccaaagaagtataatttggggtgatatatatctagtctcctacagtcatattttgggggtggtgtgtcctgagccccaacatttccttctcctgtgatggtttgtgtctgagacagggtctcttgctcccatgctagagtgcaatggcgtgatcatggctcactccagccttgacctcttgggctcaagtgatcctcccatttcagcctctcaaagtgctgagattacaggcgtaagccattgcacctggcctcctgtgatggttttaaagacgtctttaatcccatagtgtcagtccatttctgcacagcctctgggctgcccagctgggtgccttgttctctaattcactgtcctcgtgacagaggcaaggtcttgggcaaacattcaggcagaggctgaatcttcctttaccgctgaaagcttgttccagacctgccttcaagttttcaccttctcctattcattaagttcactcggtcttgtattccttcccactgctgctgacggtagcagttggggatttggagggggacccaaaagacagaaataactggcatactaccacagatagaagagttgtttgttcccttactacctgaattccaaccagaagaacttgtgatgagttagcgatgtgcaaagcctttcgatgtcagggacgtgctgtctagccataaaacaattagcaaggaaagcataaacataatttcaaaactcttatctaggaacaatctatatatatccaacaactattggaatagtacaattctgccttcgaactttgtccatcatttttatgtgttccaagtaatatggttttgcattaaataacctgcgtggggaagacagttgcagcatgctgtcaaaacacgacttcccatcctgctcccttccccaccgacctcgtcacgattcatggtcgctgcctcttttctcaaccacggtggccacacatgatgaaagttgtgatcgctgctgattttggggaaagagggttctgtgtcatcaaacatctttaataaagagttactattttgggggccgggtgctgtggctgtgcgcctgtaatctcagcactttgtgaggccgaggcagggagactgtttgaggccaggagtttgagaccaacctgggcaacatagcgagcgcctgtctttacgaaaagaatttaaaaatattatccaggcatgatggtgtgcacctatagtcccagctactcttgggaggctggggcaggaggactgcttgagtccaggagttcaaggctgcagtgagctacgatcgtgccactggactccagtctgggtgacagatggagactctaacataggaagttaccattttttgtaatcttgtttctgtctgcccagcatccacaacttggggggaactgtccctttctgtgggacactggtgggctaccaaccaaaagacctcacttctctggccacacaggagggctcaggatgtcaggtcagccaagaggccattgtctcccaggatttgctacctgagtgaagcacagggtaggctgacggtgttcaactactgagaccctcaccccaaggctattccagcttctgtccttctcaaaacatggtggaagccacagagtgtacatttccaaaatatttccttctttcccttaacattgggcagtatagttctgttgcttgcaacccagccctggtatgctacatatactacacacagacccttcactttcaaagaattattctttaataaaatactcaggaccctcctgaccaggtgaaatagatgctccaggctcctgatgacccaaggcagcaatgctgtcacctcagtgcactctccctgtctcatctataccctctgtagagtgctgacacacgggtggactgtggaacaaggggatggcggcccagagcacccagcacagacgcggggagccagcctgggtcctcagtagcaggtggcatgcccagttccaggaagcagcctcatgcgctccgtaggtttgaagtctccatagcccagcctgggtcctcactacctctgtcctgttgtttgcagacattgggcctgcaaagcagcccagcggggccctgcaggtgaatatcaactacaaaagccgcccttcttctttctctccaaaaccctcctacccagtccacccctagtcaaaaatgaggaaaagagccgagcctgaggctggggatggtggctcatgcctgtaatcccagcaccttgggaggctgaggtgggcggatcacttgaggtcaggagtttgagactagcctggccaacgtggcaaaaccctgtctctactaaaaataaaaaaaattagatgggcgtggtgagacacaccctgtaatcccagctattcggggggctgaggtgggagaattgcttgaacctaggaggtggaggttgcagtgagccgagatcgcaccactgcactccagcctgggtgacagagcgagactgtctcaactaaaaaaaaaaaaaaagccaagcctgggaggctggaagggcagcaggtttcctgcccagctttggggccatggactcacaccttgagaaaaccaagagaggcctaacaagctgtacccatcccctctcccactcctggctgcagccactccttacctgtggacccctgcccagctgtgacccagcagagaggtgccacaaacctgggcacactgagccctccccatgccgcccagccaagttttgagtggatgatgtttccagtcttactcaagaattcagatgtcagcccagccccatcccaagaggctcagcctcctgctgtgggatctgtatccggctcaagccctccctgctggaagagctgcttgggcccagggagggctctcctgagccacccacactggggactgtgcctttcattcccgccaacgatacaggtaggggagggggtgaggagccagtgacagctgcgctcgaggctaaatgctaggccaccctcggccttaaatctctgtcctctcaacacagttattgacaacaccaccaagcattgatgaggatgcggagcaaccggaacttgcgcggaggttggtggtgggaaagtaaaatgacacaaacactcaggaagcaggcctgggtgttatttcttttttaattgtctatataacaaaatccactgttgtcactgttttccagcatacagttcagtggcgttaagggcattcaggacagctctcatgacagactcacacccacatgcacacctggtgccccagcctgctttgtccactgtctccatttccccagggctgcttttactttttattgtattatttttgaggcagggtctcacctggttgcccaggctggagtgcagtggcatgatcatagctcactgcagcctcaacctcccaggctcaagtgatcctcccacctcagcctcctgagtagctgaaaccataggcgccatcaccatgcccagggctgcttttaaataatggcaaagccagcaaggctcactcgcgtgcctgggtcatgttctacagctgcttgaccaggaatcttccaatgccgtatgaaacctcaccaggaccaagaaagagaagggttccctgctcagaccagacacttgcagcatggggaaggaggagcccctcccagcagacccagttctcctctgtgcagtccggcctcatttcccacccaagctctgaccaaaccccctcctgctgctctgagtgcctgctgtgctcctgggggccctctccacccttctgtagctcctgaaaccttgtccactctgcaagggccggggcgtgccagttcctcccagaagcaccccaatgtttctgtcctttcctggaatctcacaagcacccaggtgcctctctgccttgcctgccccgccctccttggcatcctggactcgtggcttctctgcccatttcctatggcacccagcaggaggctgggcagaagatagtgtctgtgggacacctgcccttgccctggtcacagtgccatccaggagtccccatacttgcaaagtatgtttgcactgtgtgaaaaacttaaagcagaaacataagaacaaaagtggacacttctcaaaagaataaaatgtttgcataaaaggcagaaagacagggatgtcaacagtggttctctaggtcacgatggcgggagcagcattcctgctgacaagcactcctgccccgcgcagccacgctgggctgccgccgcctgtcagcctgtctacaggaggctgcagagcggccgtaaatgcctttgaaatagcatcacagttatttgttaggtcatctcctagggagatgatacacagttttcaatcccagtgagtctttctaccgcttgtaaaataaaattaaattacaatgattcaactgttgaacaagcttatagagtcataaaagaactatgattttctatctcacccttccgtctggcaatcaaagatcacacgtagaacttctacacatgaccaaggaccagtactggggcctccttcccacctgaaacaaggcaggacttcactgcgaggggctctgaaaaggagatgctgcagggtgccacccctgagtcccacagttagggtcctttgtagcccaatgtccccaagtccctccagcatgcctgggactgaatggtcctgagcggctggggtaattttcctgaggaggtggcacgtcatctaacacacatgggacagaaccatggccccctggtatgcttcttggtggtggcagtggggcagggactctatcttagctcaaagccagggctctcattacatgggtggggagctgtgtggctccagaatcaattaccttcccagaccaggcgcggtggctcatacctataatcccaacactttgggaggcctaggcaggaggattgcttgaagctagacgtttgagaccagcttgggcaacatagcaagaccccatctctaccaaaaaaaaaattttttttttttgagacaaagtctcgctcttgttgcccaggctgcccaggctggggtataatggcgtgatcttggttcactgcaacctccgccttccaggttcaagcaattctcctgcctcagcctcccaagtagctgggattacaggcacccaccaccatgcccagctaatttttgtatttttagtagagatggggtttcaccatgttggccaggctggtctcgaactcctggcctcgggtgatccgcctgcctcgacctcccaaagtgctgggattacaggagtgagccaccatggctggcctacaaaaattttttttttacaaaattagccaggcatgttagtgtatacctgtcatctcacctactcaggaggctgggatgggaggatcgcttgagcctggaggtcaaggctgtggtgattgcaccactgcattccagcctgggtaacagagtgagaccctgtctcaaaacaaacaaacaaaagtaacaactaaacaaaagagaataaagtacttgctcaggaggatagagaagggctaggggagagggcagaaaaggtttgtacaacttagagggcatgaacagcagcagcaccttgttttttttgaccaaacaagaaaaggcccccagagctcacgcacagctatcatcagggccggtgccatggcctggctcctcgggtgacacttccccatctgacacatggcacgagggctcagctgcccgcccaacccttccagcacttcccagctgcagatctaggagctggaaggcaggcctgctcagcaggccacctactcaccagagcagtgggtgtcatagaactcatctcagtggcaatgtggccagagaacatgccctggctaaaacagatttcagcagcacgttattaaaataaagcacaatgggccaggcgcagtggctcacacgtgtcattcccgcactttgggaggccaaggcaggaggacagattgaggccaggagttcaagaccagcctgagcaacatagcaagacctcatctcaacaaaaaagaaaaaaattagctgggcctgacagtgcacacctgaggtcccagctactcaggaggctgaagcagaaggatctcaaacatgtttgaggctgccgtgagctatgattgcaccactgtactccagcatgggcaacagagtgagaccctagctctaaaaaaaaaaaaaaattaaaaaataaagcaaaatgttatcaatggattaaactatgagaccatttatttcttccctgccctgcagcgttcagtgggcttacgcacctccggctgccaccatgggctgccctgcagggaaggcctgtgtgaggcagacctttcaggccagaggaggctacaccacgggctcccgcagattctagcaggtgggggcatgagacttcaggtcataggagcagacatcgcagccgtccagcaggtctgcctgagagacgccattgaggctgggggcaaccagagctctggggttgtcctgcacgcctgtcctcgtgagtgtgtcctggagaagttctcggattcttcggttttccctgaaggtagattcccaaataacttcaagttcaccttccatttctctgagggaaataagtttaaaatggcacaattttaaaaataatatagagcccatatgaatcccaaagtagcaagaactcaaaacagaagaacgctatcagcagggaacagagccctcggtgcctgggttctgaagcaagcgctcagtgtggaatgaagcagctggtgccctgggaatggggagcagcaggacagcccaggctggggctcagtgtggaatgaagcggccagtgccctgggaatggggagcagcaggacggcacaggcatttctcttccctctatgttctgcccttgactttggcgccagtgcaatccctgttttctctcaagaatgaacttgggcgtgtcgaataaggaactgcaggaactgcagggctggccttggccagccagacgctctagcacgatggcctggccacaggcacccacacagcccctcctgtgtcccgtctgcttgtccactgtgacctggccagcactcagtgaccttccacaggtcttccgctccatacagcccagagctaagagcgagtcagggggtgaggtgggggacctgaggagataagactcattgccaagatggagaagattggcctggcccatgtgccgggatggggaggccctgaggggccgaggcatgtgaggttggaaagagccacagggcagcgtttccagaaccaggatgcagtgccctgtggtgtgctggggagacaggacagatgaaggtggccacatcctcacagggccacagtccactgggaatagaccaggacacgagccacacctcacaaggtgcttagccccatcggggagcatggccaggctggagaggccagctccttcccggacactgccagatggttctggaaaatgttggaaactggatttgcaggtggacttcgcaccacggtttaaagagcaggacactgaagttcagggaggccagtgatgtgcccacttggccagagtcacttttcttgtgaacgttccttccttccaaggcccctgatgcccactgtgtggtaagaacaacttaattaaactatgtctaaaaaagccccagcctgggcaacatgtgagacctcatctctacaaaaaacttaaaaattagctgggcccacgtggtggcatgcacctgtatttccagctactcgggaggctgaggcagaaggatgacttgagcccagaaatttgaggctgcagtgagctgagattgtgccactgtactttagcccaggcaacagagcaagaccttgtatttaaaaaaaaaaaaaaaaaaaaaattccccagactttggttttctgaagatatttggtaaattatagcaatcatgtttaaatgtatggctgaactcgaaagaacaggcagtctctaagggcagaaaaaatgaagcctaaactgaaaccaaagaggcagacaaagtatcagttgctttgaggacaaaagtcaatgccaaaccctggatgtttgtagactgagagatcgtgcagatcaagagtgacagaaaatctcaggacccactcttgtccaagtttctcttcctactagaggcactgtgaaggtaggtaagtggaggatgtgaaggaccctcaaagaaaggaggggtgggtgggagacctgcagatcttcaaaggaaacctgttctgaaaggccaggcatcacctggggactagagccaccggcctgctctcaaatggatctggagtgagtctacactgttccccatgagtggggatccccaggccctgactgcagtgaatgaagagtttaaaaaagttgggcacagtggctcatgcttgtaatccctgctacttgggaagctaaggcaggaggatggcttgagcccaggagtttgaggctgcagtaagctatgatcacaccactgcactccagcctgggcaacagagccagaccctgtctataagtagtaataataataataataatagaaataacagaaataaaatacctaatcaaaaattaataaaatctctcaagaaaatgaaacaaaactggctcatgcctataatcccagctatactcaggaggctgaggtgggagaaccgcttgaatccgggaggcggaggttgcagtgagccgagatcgtgccactgcactccagcctgggagacagagtgagatgctgtctcaaaaaataaaataaaaagaaaatgagacaaaataaaaatatcagtgagatggaaggcagcagaaaaaaagagaaaggcaattagaggtgtgcattgattccggaagtccagttcaaacaagaggaatttttaaaagaataaagaagatgaggagcaaataaaacttgagaccaatattacattcagatcagagtaaaatgtagaaacaaaattaaacaatggaacaaataaaacaggcccagagggttttagcagaaccctcaatcagacattcagacatctctgcgggccatggcgcagggcgcatgccccacctgttctgctgcagcgcctggtccagcacctcctgcttgtccttcagcacctggtgcaggtgccgcatctcctgccggtactgggctgtcttgccggcgaagtcctcctgctgctccagcagacggtgactgatgtcccccagcttcagtgctgcctgcttcttgtagccctggtcgggggaaggactctgtgaatgaggggacgctgccaggccagggtggacagtgcctcctggctgtgctccctacccactccttgtgtgtcagagcctttaaaatctagcaaccccggataagtttggtctgggattgcaagtctggatcataaaagtcataaaaagtgacaaaagaatttcaggtacaataaaaccaaattttaatgtatataaagcctagttctttatatgctataaataaatgaaaacataaaatatcaccattggaaacagcagttcatgcttctaatttcagcactattacaggctgaggcaggcggatcacttgaggtcaggagttcaagaccagcctggccaacatggtgaaaccctgtctctattaaaaatacaaaaattagccaggcgttgtagtgcatgcctgtagtcccagctacttgtgaggcagaggtgggaggataacttgaacctaggaggcggaggctgcagtgagtgtgatcacgccactgcactctagcctgggtgacacagtgagaccctgtctcaaaaaaaaaaaaaaaaaattaccatcacagaacaaactggatgttcttgcaaattaatctacaactgtattttttccaggacaactcttatccctgcatcaactggtaacctaagaactaatgctgccactggtcagcactgtttcaccttgacaagacagcctcattgaagaatccaacaagggctgtcactctctgtcaccaaacagacagctgagatgaaagcccgctatttactttccttctttcgtttttactgtatagtactgaaggttctgaattttcctgtgagcattttttttctttttttttgagacggcagagtcttgctctgtggcccaggctggagtgcagtggcgcaatatcagctcactgcaagctccgcctcccgggttcacatcattctcctgcctcagcctcctcagtagctgggattacaggtgcccaccaccacacctggttaatttttttgtattttttttaatagagatggggtttcaccatgttagccaggatggtctcaatctcctgacctcgcgatccgcctgcctcggcctcccaaagtgctgggattacaggcgtgagacaccgcgcccggccgagcatttctaaaattattgtcacagagagtctgacatgtagtcccacagactcatttttttataagaagctctgacactcagtttatacattctctctgacccaagaattgtttagtgcacagtttttacacttccaagtgaaataactttttgttttttgattttgcttattaatttctgtttttaatatttgtgaccaacaaatgctggccgggtgcggtggctcacgcctgtaatcccagcactttggaaagttgaggcgggcagatcacctgagttcaggagttcgagaccagcctggtcaggagttccagaccagcctggccaacatggtgaaaccctgtctctattaaaaatacaaaaatcagctgggcgtggtggcacatctgtaattctagctactggggaggctgaggcaggagaattgcttgaacctgggaggcagaggttgcagtgagccaagatcacgccactgtactccaacctgggcgacaaagtgagactctgtctaaaaacaaacaaacaaaaaacaaatgcctacattatttctactttagggatttattgaggctttctttgtagccaagcaatgatcaatttttgtgtcttttatatatatgtaaatataccctgttgattatgttgttaaatcttctattttcttattttgtttaacatcttgatcagtcttggattaagagaggtggattatagctcctattaccaagtttccatttttctttgtatttcctgtagtctacacttcataaatttgctgctgtgttatttagcgcatagatactcacaattactatagatgatgatgtagacaggatctcactatgttgcccaggctggagtgcagtggctgttaacagacctgatcattctgcactacagcctcgaactctcagactcaactcaagtgatcctcctgctcagcctcctctacagggacccacacacccagctcatactatatattattaactgtagtcttttagtattataaaaatctcccccttttttttggtgtcatttagtgcttttggtctgaattctatcttggcatatgttaagatttcgacctttactttctttgtgtttgcagaaatctgggttatctctacccatcctttcaatttaaatccttcatgaatactttgttttaggttggctcttgggtctagtgtggaatagcattttgctttatgagccaatccaaaaaatattgttttccctaataggtgaattaagctaatttacatttacctataggacacatttctttggtctcaattttgttattttatgtttggttgttttatgtacatatttttaaaagattttaaactaatatagtctttttctttgcttttttgctgttataattctaccatttaaaaaaattaaaacaattttttttagaaacaggatcctgctccatgctctgtccctcaggctggagtgcagtggtgtgatcatagctcactacagctttaaactcctgggctcaagatcctcctgcagagttgggagtacaggcgctggctatcaagcccggctaattttaaacttttttttagagatggggtctctatgttgcccaggctgatcttgaactcctggtctcaagcgatcctactacttcagcctcctgaggagctgggattataggcacgtgccactctgcccagctctaattccactatttaggaataaagctcgattcttgtagttggctttattcttacgcctttatattacatgttcttagtcccctgtttttagatcgtatccattggttccctaacaaaagtaacaatacattagctcatgacaacgttttcttcacttttcccctccttctgttcacctgcttaagtatgcttaagctcgtaccacttggtttttcagctttaatgatatcccttgactcttattacctacgaagaaatcagcaagtgcaatctactttctaccttccttccccctttgcccatcagtttccttggttgtattattactacattgtcagaaaacatttacatacaattctatcagccttattcccgctctaagtcttattttacagttaaatatattcttcgctcactacaagttaattttgccgaagtttccccaattaactcttggttggcaggactcattgttgagacagggtcttgctctgttgcccaggctagagtgcagaggcacgaacatagctcactgcagcctcaaactcctgggctcaatcaatcctcccacctcagcctcccgagtagctgggactacaggcatgtgccaccaagcctggctaattgctgtattttttgtagagactggggtctccctatgttgcccaggctggtctcagactcctgggctcaagtgatctgcctgccttggcctcccaaagtgcttggattacaggcatgagtcactgtgcctggccattttctttatcttaaagtcgtatgtcttggtgtcaattttctgggtccattctgtgtcagttttccctaggtacataatgtgccctttcaggacatagattcaagtcttcttttatttcagaaaggtttttatgagttacagtttagagcagaataagccactgttttggtttcttctttggaggctctagaagtcagtctcttagatctccatcactgtccaccgaatcctttgcacatctccatttccactttcctgtctgtctttctcggttctagctgcatatcccttattgcgctgttatgacatctgtctccatagaattcagactgcatttcttaaaccgcttctctgtcccttctatttcttccctgggtcatgtcagttccctcccacaccctcctaggccttgctgcctcttcctgaggtcctgtgtctgctctgtgacatttcttcctggctctgactgcctcctgaagtcctgtctctccagctatctccagctctctagccagctacctagtggttcactttggagtatagttttgatctcctttgcggcaacacttttcctggtaagttttcagcagtttccgtcagtaggaacttatgcttctatttttcttccttttccttaaactgcttttatatgaaggcctctgaattcctctggaatgagaggaggttcctgggagggtgggagcgacagttgggccagagtgtccttccagacttcccatgttcccaccaccctccacctcgcagccccatctcccactctctgaattcagcctggtttggaggggcttctgcctgcatccctcagttcccagatctcgtcacagccccggatttccaaggtgatgtcctccctttgaagagtgatattttgcagggatttcctgaaatgtcacctctgatttctcaagccttttctcttcattccccccgaggccctggcctgtctaccttggggcctgctcacaggtgtctcctccgggtgagccggttttactattcctgttcagataaatggtaacgctatggattccccaagcaaggccaactactccgaggatcactccttctcttttggaagtaaaaagcaggaaaattagaaaaaaagaaagaaagagagaaaagaaaaaccccacagggggattttaaattactcaatacttccatgccgagtcccctcataaacagcatggcatagccccttccctttcagcctttctttttttttttttcttaaagagacagggtccctgccaggtgaggtggctcatgtctgtaatcccagcactttgggagggccgagtcaggcagatcacttgagctcagaagttcaagaccaccctgggcaacatagcaagacctcatctctaaacaaaaaaaaaaaatacaaaaaaaaaaaaatagccagacaccatggtgcttgcctgtagtcccagctacttgggaggctgaggcaggaggatccactgagcccgggagttcgaggctgcagtgagccattgtcatgtcactgcactccagcctggatgacagagtgagatcctgtctctccttttattggtgttttgttttgttttggttttggtttttttttgagacagggtctcactctgtcacccaggctggagtacagtggtgtgacctcggctcaccacagccttgaactcctgggctcaatggagcctcccccatcagcctcgagagaagctgagactacaggcaagcaccaccatgcctggctaactttttaaattttttgtagagattggggtcttgctatgttaccagactggtctcaaactctcgacctcaagcgatcctcctggctgggcctcctgagtcactgagattacagcgtgagccactgtgccttgcttcatatccttttttcttaaacagctatgcagtattttattgtgtgaatgaaccaaagtttattgaatgaggtgagaggtgctattctgccagcaaaaccttacaatacttttactctgtggactattagtgatgcacatgcaaaaggtgtcattttcttaaacacaaaaatccacagcagtgagcctgcattcccatctgaaaatgaaatctctgaggccaaataaccacttaccttgactttttcctctaactttcccaggcgaatgttgctttttatgactttattaagcactccatccttctcactttctaaacattttgcctagggagaagggtgataaatgggctctcagttttacagaaaaattgaaataacaaacaattattttgcaaagagtgttactgctactgctcacaatcttcattctgcaacctgtcctgcctcaaccccttccccacccactgtgtgagggcctgggcctcaggccaacagttgaggatgggcaggaacagggcatgtggggtgccctgctcgacacaaagagaagaattccagccccacagaccaggggaacgggagaggctgcaaaggtttccagaatgcatctctactcttatggaatctatctttccttcaatcgcatccaaggaataagtgccaagaggccaatcaactcataacttgactcatttgaacaatttcaaaattaaggataacataatatgaatgcacaatgccgtttctccaagccatacatgaaaggcaatacatccagcagagatgacatcatttgaagtcgaatgatttaaactaatatccaggttggacgtgacctgctacattctataaattaactatttcagatgctaaaataaaataagtaatggtgagcattctttccaaggtaggctagtggtgacaagtttgattttccagaaggaaagctaagtcacagagaaattgctccaggtcacatggaaaatccaccctagaagcaggatttaaaaagatctcaggccaggcttggtggtgtgcacctgtagtctcagctactcaagaggctgaggcacgagaatggcttgaacccaggaggcggaggttgcagggagctgagatcgcgccaccgcactccagcctgggcaacatagcgagattctgtctcaaaaaaaaaaaaagatctcagtacctaagactattgtgtctcccacaaaaatgtaataaatgcaagatggtgcagtcatacttggggaaactgaaagtgatttttgttttttctttttgttttatttatttatttatttatttttgagacaaagtctcgctctgtcacccaggctggagtgcagtggtgcgatctcagctcactgcaacctccacctcctgggctcaagagattctcctgcctcaacctcctgggtagctaggactacaggcacgcgccaccatgcccagctaatttggggaaaccgaaagtgatttgtagccagaggtcatcagcagaaacttcccaaggcagagtggagtcctcccactgttggtgtatgtacagggttgggtaagggctctcacgagctcctggagaccaggatggggtagggcaggagtacgtggctcagtcctaggacagggcagagactggcagagcagccactaacacccctggacctggctagaggggctggcctaggcactcccagggtcaaggggcctgcaaggctgtagggatgtgtccactccagacctggctacagaggaccaagagccctgcccagacatcctggcagctcccatgcctctccctgcatggatagcgggtgtctgcttggacacaaaagtccctggtgacaggtggagccaggatggaagaaagcagctctcccacaccctacatttccgctttgactctgaggggcctgaggattctaaacttgacagccaggccatgataaaggtcaaggcaggagaagggaacacattttactaacagtttgttggctcaacaagtaacttttaaatatctggagacagtcagtggcctccatttgtatttccatcctgggcccacaaatattgggggtgggccgagaggagagtgtctgagggtctgggaggatcctgacttcgttgtggaagcctgtgatactccctggcccatgggagaggcatggggcctgcaccccagggaccgggattccctgcacgtcctgccctacaaacaagacggctttgcgtttacagtggcctcaacatgtggcgggcaggttcccaggaaatctctggatgaaagggtttgttcggccctttagatttttcagcaagctttctcttgccctctccatgtcccggtgaggaaggccagcacacacagcagcagaagggaaaatgggcacttaatgctaccacagagagtgccagggttcagctgcctttcagaggggcagcgctgggccagacacttgagtgccttcaaggctccatccatgctgtgtcaaagtcaaattgctttctggaaggctctggaaaggactcagaagtcaccagtaaagtatggccagactgaccacactcttatcagcaattattgtaatttaaaaaactgttttcagccgggcacggtggttcacgcctgtaatcccagcactttgggaggctgaggtgcacaaagtcaggagatcgagaccatcctggctaacatggtgaaatcccgtctctacctaaactacaaaaaaattagccaggtgtggtggcatgcgcctatagtcccagctactcaggaggctgaggcaggagaatcacttgaacccaggaggcggaggttgcagtgagccaagattgtgccactgcacttcagcctgggtgacacagcgagactccatctcaaaaaccaaacaaacaaacaaacaaaaacctgttttcaggaggaaggctcagggtggctggctggaggcacaggatgtcagactcctccacacaggagaaccaaaacaggagtcagtcatcgcacggagaacatctaacggagaccacgggaactcgacaggggagggctgggcggcacccgcgcaatgaaggagagggagacgacagcccagacaggatgggtcttggtcgggagcctggagaggctcccctgtgtcgggaaagggtgagagatccccaggggtccacattctcaccacacactcctgtgatcccagccccaggggagcccctcaacccctgcaggccctgagactggtgcagggagctccctggagtctgtgtgaccccactgctccagagcgggggctcacgctgggtcccacactgacccaggttccaggtagctgcagcacagtggcatcattttgagagtccagcccccaccagactacatcctgccctgggacccagcagcccctgcatctccacatccctggagcgccacggacatctccccacatgcacccggaaggctgcagcggcgaggcaccaggtggacccagtggagcagcgggtccccagcactctaccctacagtgtcctgcatacccagaagagtgtggtgcagtgcactgaagaggctgcccatgagagcaagggagccgaagcaagtgctccccaatcctgaaacctgcctggctggggcccctgtcactaacagcaaccccaccccctccagccgcagagccctgcgcacgtgcatgtgccctgaagacaggcttcccctgcccaatgcctccattgccaaagcaacccaagcacaccacccagggcctggggatcaccccatcctcttcaccacagcctgcagggagtgtcccaccatgttggttgccccaggcacacacacaaacacacacacacacacacatacaccaatacaaaaaattagaataagtgactgttacacttgatttgcagaaatcaatgaaaggacataataaacatgacaaagcaaggcaatatgacacctccaaaggaacataataattctccaacagcagattccaacaacaacaaaaagaaatttatgaaatgcctgaaaaagaattaaaaataatgatattaaagaagctcagtaaaatataacagaacacaaataaacactataaagaaatcagaaaaacaattcaggatatgaatgaggaattcatcgaagagacagatataaaaaagaactaaacagaaatcctggaactgaagaattcaatgaataaaataaaaaatacaattgagagcttcagtgatagactagatcaagcaggagaaagaatttcttttgctttttaaatactcagtgagatgaaagagagagagagagaaagagagagagaaacagagagagagagagaaaaggagcaaaagaaagagagaaaaattaaaaaaaaaaatgaagcatgccttctggtgttccaaggggtgaaaagaagtttaatggcataaaaaacctactcaacaaaataagttgaaaacttcccaagtctagcaagagatttcgaaatccagatataggaagctcaggttcccaaaaaggtcttctcccgacgacattatagtcaaactgtcagaagtcaaatacagaattctaaatatatatatatatatttagacatacatatatttagacatatatatttagacatatatatatttagacatacatatatttagacatatatatttagaatatatatttagacatatatatatatatatatatatatatatatatatatatatgtctagttacatataaggaactctcataagactaacagcgtatttctttcttttttctttttcctttttttttctttttgagatggagtctcactctgttgcccaggctggagtgcagtggcactatctcagctcactgtagcctctgcctcctgggttcaagcaattctctggccttagcccccaaagtagctgggattacaggcatgtgcaccaccacaaccagctaatttttgcatttttagtggagatagggtttcgccatgttggccgggctggtcttgaactcctgacctcagatgatctgcctgcctcagcctcccaaagtgctgggattacaggtgtgagccactgtgcccagctaatagtgtatttctcagaagaaaccttacaggccaggagagaatgagacgatatattcaaagggctaaaagaaaaaaaaaaaaaaaaaacctgtcagccagccaagaatactatacccagcaaagttatccttcataaatgaaggagtaaagacttacagataagcaaacactgagagaatctgtcaccactagacccatcctacatgaaatgcttaagggaatcctacacctggaattgaaaggacgatatctactatcatgaaaacacatgaaatgataaaactaactagtagagcaagcacacaaatgaggaagagaaggaactcaaatgttatcactatagaataataagataaataagaggaaaaatgatacacaaaacaaccagaaaacaatcaacaaaatgataggagtaagtcctcgcatatcaatagtaaccttgaatgtaaattaattaaattttccacttaaaagatacagactggctgaatggatatcagaaaaaaaaaacacgattcaactatgtgctgcctacaagaaacacatttcacttgtaaagatccatacagactgaaagtaaagggataaaaaaatattccatgcaactggaaaccaaaagcaagcaggagtagctatacttgcatgaaataaaacaaactttaagtcaaaaactgcgtaaagaaggtaatattataataataaagggataaattcaataagaggacatatactctaaacatatatgcacccaacaccacagcatccaggtatataaagcaaatattattagatctaaaaggggagatagactacaatacaataatagttggggacttcaacaccctactctcagcaatcagatcatcaagacagaaaactaacaaagaaacattgaatttaactgcactttagacaaaatgacctaatagacatttacaaaacatttcatccagtaacggcagaatacacattcttatcagatatagaacattgtctagcatacactgtgtgttacgctacaaagcaagctcaacaaatttaaaaatactgacatcatgtcaagtatcttctcagaccatggtagactaaaactagaaagcaataacaagaggaactttggaaactgtacaaacatatgaaaattaaacaacatgttccttaacaatgattgggtcaatgaagaaattaagaagggtatcaaaaatttcttgaaacaaatgaaaactgaaacacaacataccaaacacaacataccaaaacctatgggatacagcaaaagcaatgctaagagggaagtttatagcaataaatgcctgcatcacaaaagtggaaagatttcaaataaacaacctaatgatgtacctcaaggaactagataaacaagaacaaacagaacccaaaattagtagaaagaaagaaaaaacaaagatcagagcagaactaagtgaggcagggtgaaacgttcttatagtcccagtgacgcaggaggcaggaggattgcttgaatccagatgttcaaggttagcctgggcaacatagtgaaaatccactgctaacaaactgaaaacctagagaaaatggatacatttctggacaacatacaacctacagaggcaggataagtaaagttatgagaccatactgacttgtcccctttagtgaagccccacatgctcctttctcagtgggctcctttcatgtgcgcccttgtatgtcagcacctaacttatcttagcaagataagtagtcccacaggatcccagccaactaccaggtggttacacgttcctgatacccaatatggcctaggaaaaagaacaaaaatcccttaatcgtaatgtagcttccccaatctccagccaatcaacaccaaaagcccaagaagctattaactaccaattcctgcctgggcagggctaaagatatctccagggtcctgcatgtacagctaggcacaaggtttagcttacagtgagcttttcctcattttaatagtaaaaaacacaccctaggtggaggttttatatgctaattatacatgtgatacatgttagagcatgtacatgctgagtgcatgcaccaaccatagttccacctttcacacttgacctcaccaatactttatgaatatgcatgcacagctcctgtaaagggcatccccttaaaatattagggtctgtctcttactctgtctctcagagtgacttctgctatgcaatagacttcttcacctgctcttactttggactagctctcaaattcttttgtgaagtcaagaacctgaactggcccattgacaacactaccaagattgaattaggaagaaatagaaaacttgaacagaccattaacaaataatgagattgaatcattaataaaaagtttcccaacaaagaaaagtccaggaccagatggtttttctgccaaattctacaaaccttacaaagaagaactaatacaaattctcctcaaactattccaaaaaaatttaagaggaaggaattctctctaattctttcaggccagcaataccctgctaccaaaaccagacaaggccacaataaaaaaagaaacctacaggccaatatccctaatgaacacagatgcaaaatcctcaacaaaatactagcaaaccaaattcaacagtacatcaaaaaaataatatgccatgatcaagtgggatcaagagatgcaaagacagttcaacatacacaaatcaataaacatcatagatcacatcagcagaatgaaggataaaaaccatatgagcacaccaatggaaacagaaaaaaattggataaaaattcaacatccttcgtgataaaaacacttaataaactagacatagaaggaacatacctaacataataaaggccatatatgacaaacccacagctaacatcataccgagtaggggaaagcaaaaagcctttcctctcagaactgaaactagttaaggatgactactttcaccactcttattcagcacagtactggaagtcctagcaagagcagtcaggcaagagaaagaaataaaagtcatccaaattagaaaagagaaagtcaaattttttctctttgccaatgacatgatcttatatttagaaaaaactagacttcaccaaacgactcttagatctgataaaaaaaaaaaaagtttagtaaagttgcagaatacaaaatcaatgtataaagatcagtagtgtttctatacaccaataatgaattccctgaaaaagaaatcaagaaagcaatcccatttacaatagctacaaaaaaatacctagaaataaatttaaccaaagaagttaaagatttctacaaggaaagctacaaacactgatgaaagacaatgaagctgattcaaactaatggaaagacatcccatgatcatggatgcgaagaattaacatcattaaaatgaccagactccccaaagcaatcagcagattcagtgcaatccctatcagaacatcaatgacgtttttcacagaaatagaataaacaatcctactttatacatatggaaccaaaaaggagcctgaaaaggcaaatcagtcctgagcaaaaagaacaaagctgaaggtattaccctacctaacttcaaaatacattacaaggctatagtaaccaaaatagcacagtatcagtacaaaatcagacacattggccagtggaacagaataaagcaccaagaaacgagcccacatatttactgccaactgcttttcaacaaaggcaccaagaacatacgctggggaaagggcaccctcttcaatacatggtgctgggaaaattggatatccatatacagaaaaatgaaattagatctctatttctcatcatatgcaaaaaatccactcacaatggtttaaagacttaaatctaagacctgaaactataaaactactagaagaaaacatagaggaagcactctaggactttagacaaaaatttcatggctaagaccccaaaagcacaggcaacaaaaacaaaaatagacaaatggaactatattaaactaaaaagcttctgtacagcaaaggaaacaatcaatagaatgaagagacaacctgttgaatgagacaaaatatttgcaaaatattcattcaacaagaggctaatacccaggatatacaaggaactcagttctctctgtctctctctctctctttttttttttaaggaacacaactcttaatagcaaacaaacaaacaaacaaaaccaatcccattaaaaagtgggcaaagaatctaaatagacattccccaaaagcagacatacaaatgggcaacaggcatatgaaaaaaatgctcaacaccacaaatcatcacagaaatgcaaatcaaaaccacaatgagatatcatcttactccagttagaatggctatcattaaaaagacaaaaaataacagaggctgatgtcaacctaaaataatcaaaagggtgagactctagtttaaagagagtttattcaagcacaaagtttgaggacaggccacccaggaagtagattccaaagaacagaagtctgtgttctgaagtgcacaagtttgggatcgctaataggaccacatgtaggaaagcttaacagaatttcagtgtctttctatgtaagactgaatgcatagttacaacaatctaattagttgaggcagtctttttctttcaggaaaggtatatttaacattccacattgaagatataacagtcatggggtcatgggtgccatctggtcttaggtagaagaacaataaaggaagcaagcagttcatctttatagatagatgagtgactggaaggaggagaaggtctggtctctggtttctcctagtcatttacaaaacaacagcaatgaggaagagaactaacctataagaagcagaatagccaacaagctacattgctcagtctccagggcttaacttccccctttgcataatacatttagagggtcctgaaattttttttcttttcttttttaaaattgagacagggtcttgttctatcacccaggctggagtacagtggaatgatcgacctcctaggcttaagtgatcctccttcctcagcctcctgagtagctgaaaccacaggcatgcaccactatgcctggctaagtttttcgttatttgtagagacaggttctccctatcttgcccatgctggtctcaaactcctggacccaagtgatcctcccacctcagtttctcaaagtactggaattacaggagtgagccaccatgcctggcctgaaattttactttattttattacactgatgaggatgtggagaaaagggaactttcatacactgttggtgggaatgtaaattagtacagccattatggaaaacagtgtggaggttcctcaacaaactaaaaacaattaccatatgatccagcaatccaactgctgggtatttattcacaggcaaggaaatcagtatatcaaagggatatctacacccccatgtttattgctgcacaattcacagtagcaaagatatgaaatgaacctaagtgtccatcaatggacaaacagataaagaaaatatgctctatttacacaatgaaatattatttggccatataaaagaacaaaaccatgtcatctacagcaacatggatggaactggaggccattacgttaagtaaaataagccagacctagaaagataaatatggcatgtactcattcatatgtgggggctaaaaaagttgacctcatggaggtggagattataatgatagctaccagaggctaggatgcatgtgggtatgggtgtgtttgtggggggctggggggcaggtggctgaatgaagagaggttgcttaataggtataagcatacagttagatagacgaaataagttatcatgttcgacagcagagtaggttgactaaagttaacaacaaagtattgtatatttcaatatagctagcaatgaggacttgaaatattctccacacccagaaatgataaatgctcagctgggtgtggtggctcacacctgtaatcccagcactctgggaggccgaggtgggcagatctcttgaggccaggaattcaagaccagcctggccaatgtggcaaaaccttgtctctagtaaaaatacaaaacctagccaggtgtggtggcatgcacctgtagtcccagctactcgggaggctgaggcacaaaaatgtcttgaacccaggaagcggaggttgcagtgagccgagatcacgccactgcactccagcctgggtgacagcgtgagactccatcttaaaaaaaaaaaaaaaaaaaagataaatgcttgtggtgatggatagcccaaatacctgacttaattgttacacattctatgcacattacaaaatatcacatgtacccccacatgtgcatgtaaatatatttaaaatattttttaaaatgtaaaaatattatgcattaataaaaagatacaattgtttaaaaagaaaaaaatgttttgtaacattttttgagaatggtatctcaagactggtttaattagcattttttttttttttttagggacagggtctttctctgtctaccaggctgcagtgcagtagtacagtcatagctcactgcagccttcaactcccacactcaaatgaacctcctacctgagtttcctgagtagctgagactacaggtgcatgccaccatgcctggctaatttttaaatttttttttgtagagatgggttctcactatgttacccagactggtcttgaattcctgggctcaaatgatcctcctgcctcagcttcctgagtagctgggactacaggcacacagcaccatgccagggtaatacagttgaaattttaaaatacagatggttctagacttacaacagggctacatcctgataaacccatcataaattgaacaaactgtatatcaaaaatgcatttaatcctggcaatacagcagatggttcccaacttatgatggttcaatctacattttttaagctttataatggtgtaaaagcaatgggcattcagtatcaatggtaacttcattatgagttgtaaggagttcctcaatttataataagattacttcccaataaatacatcataaagtcgaaaattcctaggtggaaccatccatcgtaagtcagggaatgcctggataaagcttttaatagatcattttttaaaatactcttaaaatcacatttgcatattaactcgcagtttacttgatgtaaccttcaggaaacttaccaaacacataagactgtcacgttcctgggttatgttttctgccaggccaacaaggtttgccaggtactgatgagcagacatttcgttccccatggctttttccacctgctttttgaggacctcaattttcttttgagatttcctagagagttaccccaaatggtagaataaaaagcccattagtttacatggctagggcatggtgaatatctgtattacaaaaacagcaagtatgttagcatttaaatgctattcttcagcaacctaaatcttctattaagtttcaaggtgagaagaggtaactgaatttaatttgaaaccaagcataattagtgaccccaactcaagtgaataagaggagttgcaaatgtctaacaatgaataggttcatttttttttttttttttgagacacagtcttgctctgtcacccaggctggagtgcggtggcatgatcatggctcactgtaacctccgcctctcaggttcaagtgattctcatgcctcagcctcctgagtagttgggattagaggcatgcgccaccacacgcagctaattttctgtatatatacatatatatatttttttaagtagccagggcttctctatgttggccaggctggtcttgaactcctgacctcaagtgacctgcccatctcagccttacaaagtgctgggattacaggtgtgagccaccacacctggcccataggctcattaagtattattctattaactttctggcttatgttctaaaaggcactttcgaaaaaaagatccagaaattccaaagtagacttttaggaaatggttagaaaagagctcctagaactttgaatcttagggttatcaatatgaccatcaaccatatttcaattatagactttagaaatgttggttaacattggttaacagcaacaatacttattataatctgatatccagtaatttcaattacccttttccattttatagccactattagaaaaagaaaagattaaaagaaatgaaatggaatattcttcatttgtctttttttttttttttgagacagggtctcactctgttgcccaggctggagtgcagtggcgtgatctcggctcaccgcaacctctgcctcccaggctcaaatgattctcctgcctcagcctcccgagtagctgggactacaggtgcgtgccactaccgcctggctaatttttgtatttttagtagagacggggttttgccatgttggccaggctggtcttgaacttctgacctcaaatgatcgcctgcctcagcctcccaaagtgctgggattacaggagtgagccactgtacccagaccatttgtcttttttaactattgaaaataaaagcaacttaaaggaaaaaaagacacaaacctattgattttctgtgctcgttcaagttcggcttccagtgctttgttttgctctgtcaaactgttcttctctaacagcaggctcttcttctgcgcttgcaggactgtcagcttctccatcaactcctccatctcagccctttctttctcttcttccttctgtaattggctgaaggacaaaaacattacatgctcgtatccagcacaatgaagctaaaatggggcagtcacataacgaggaagatgagtgataacagcccagccctccagcccctgggtgggtcacttggaatgcctctgtggaaacatctccccatcctgggccctagaggacctgggaccaagctgctagaccaccggagagagggtgtggctgggcacacactacgtgtgtgtctgtgtgagacagggtctcactctgttgcccaggctggagtgcagtggcacaatcatggctcactgcagcttcgaacttctggactcaagcaatcctcctacctcagcctcccaagttgctgggaccacaggcacacatgatacctggctaatttttgtattttttgtaaagatgaagtctcactatgttgcccaggctggtttcgagctcttgggctcaagtgatcctcctgccttagctttccaaagagctcggattacaggcatgagccaccacacctggccacaaacttctttgatggtgatgatctaacctctttttctcccacagttttggcttatgtctctgtctctctgtctctctctctctctgtgtgtgtgtgtgtgtgtgtgtgtgtgtgtgtgtatgtgtgtgtataccctattccttccaaaaaatctaagatagctctattttttacatggttataaatgccagatttatttaaaaaaaacctgctaaaacaatttttccataataatgtaattataaatacatgtttttaagacaaaagaaacaaagaacaaaggggcacttattttgctgaacaccagcttgggtgttaccgaatttgcatagagagtaacttgggataggggctgcatcctttaccagcgcagcaggaatacacaacaatatatgattttaaggtttgtcaactgtaactgtaaaacatacaaaatccaagattcatttatttcactgaaaacttatttaactattattttattggataaattgttgaactggattaacgataaaaggttaaagaagaatgttgaaaataccaagacttctgctttcagccaagatagagttacagagaccagatttactcctcagctaaaaaaccaggcaaaacagaagaaacaacagttttcggactttggacaacaggcgaggcaggactgtgatcccaaagggaagggaaaacaaggtgagtgctgcaactgctccctccaccttcttgtctggcagacacctgctgagcccaggagccagagatccaagagcaggaaggtcaaggcagctggaatttccagggcagggcagagggcgtttcacggagcgagaaagggctctagagaccttgaagggtctttggctgggtactgatctgtccgtgtgtgagaggaaactgcgtaaagcctaggaaagaaacactacaaacagtaggcagaacaatttctgacatgcacaaagaacaggaaatagttcataccccaccagtcagaatggaaaggccttataataaaagagatattggatagaatccttagaagagtgttactgtcttagcagtggggctaacttagccctaagactagaggttgctttgggcccaccctaacaaaaatcagctttgaaagaatccagcttagccacatgcggtggctcacacctgtaatcccagcactttgggaggctgaggtgggaggatcccttgagcccaggacctcaaaaccagcctgggcaacataacaagaccctgtttctacaaaaagaaaaaaaaaaagaaaacagaaaagaaagtaaacaaataaataaataatccaacaattctctagtggcttaagtgtgcaccagaatgaaatctaacactatttaaagcaatgcaatatgtctaacatcctgtaacataaaatctacaccatccagcacccaatcaagcatgagaataagcaataaaatatgatccatgatcaggaggggaaaaaatcaacagaacagattcagaagtgagagagatgatggcgttggcaaacaaaggtttttagaaaaacatgctcctacatttgagaaagaagagaaaaatagcatgctggggacagagacggagaatacaaaaaagactcaaatggatctttcttacagagatgggaaaaatcattacacaaagtgaacaatatattggatgggactaacagcagattagattgtagaaggatagatttgtgaagttgaagagagatagtaatagacactgtctgattgaagcccagagagaaacaagtgtgggctaaaagtgaacagaacagtcaacaggacaacatcaagcagtccaggagaggtgagagggaaaaacagaagagaccgttcaagaaataatagccaaaagatttccaaacttgatgaaaaatacacactgatagccccaagaagcttaatgaacttcatgtagagtaaagaaaccatgctggccgggtgtggggtcccccactgtaatcccagcactttggaaggccaaggcaggaggctccctcaaggccaggagtttgagaccagcctgggcaacgtaacaagactctgtctctacaaaagatttaaaaattagccgggagcagtggcacatgcctgtagtcccagctactcgagaggctgaggcaggaggatcacttgagcccaggaggtcaaggctggagcaagcagtgattgcaccactgcactccagcctgtccaacagagccagaccctgtgcaaaaaagggtctgaaagaaagaaagaaaccatgctaaggcatatcccaattaaaatgctgaaaaacagtgacaatgaaaaattcttaaaagaagcctcagagaaaacacacgttatcttcagaagaatacagataaccgtgacagcagattttcatcataaacgacgcaagccaaaagactatcaacagccagcatctttaaaactgaatggaaaaaaacccacaaactaccaaaaacctgtcagcttggaattcttcacccagtgaaatcatgtaatcaataaagtttcataattttcccaacggaagtactgtaaatctttccacatctatttgtgaagctttgtcgatggttccttccttttaattaaaaaaattttttctcatgatgatagcctatcattaccttagttttcaaaatatcattttctttcttccttttttttttttttgagatggagtctcactctgtcaccaggctggaatgcagtggcgccacctccactcactgcaacctccgcctcccaggttcaagcggttctcctgcctcagcctcccaagtagctgggactacaggcatgcgccatcacacccagcgaatttttgtatttttagtagagatggggtttcaccctgttagccaggatggtctcgatctcttgacttcatgatccacctgcctcagcctcccaaagtgctgggattacaggtgtaagccaccaggcctggcccaaaataccattttctacacatttttttcctacaaagaaatacaattaatttttataaattttctgttttgaacaattttgctaaaacctcttatttttaatgatttgtagatttgttttctacagatagaattatgtcatttatgaataatgacactattgttttcccttttcccaaaccttctaagtttttcatgccacgtgtgtcagttaccacttggtagccagtgctgttaatgttgtcagaaatggtgtcagagggcaaccttgtattgtttccaatctcaataggaaagctttcaacatttccctatttggtgtgatctttattgtagctgtattttttaatagaactttagaatgttagaatttaatagaagttttacatctacattcataagtgaaatgaaaagtaattttcctttcttatatgatcactgttgggttttggtatcaaggttatactaacctcattagattaaggagcattaattctttttctgtttctagaaaggtttatgtaagactgaaattatttcttccttgaatatttgtagagctctctagtgaaggtatccaggcctggagttttcaaaggaagatttttttttttaattcaattcttttaatgattataggactattcaggtattcttcttcttcttgagtcagttttaaggtaagcttttcaaagaatttgactatttcatctaaattttcaaatgtattgacataaattatttctaggtgcacacaaatttaaatttgtgtgaattctacttggtaaattgagccttttatctttgtgaatcatcctctttgcttagtattgttgtctgttctgtttgagacagggtctcactctgttgcccaggctagagtacagtggtgcaatcactgctcagtgcagcttcaaactcctgggctcaagtcatcctcctgcctcagcctcctgattagctgggattacagacggtaagccatcacacccagttagtttttaaatttatggcagagacaaggtctccctatgttacccaggctggtcttgaacctctggactgagccaccatgcctggcctaagtagtattttttaccttaacatctaccttgttagagattaagatctaccatgtctattttggtttgtacttgagtagtactgcttttcctgcccttttacttttgacctttctctatccttatgcttgggacatatatcttaaagacaacacagatgtgctttagtttacactgtgacattctttgtcttttaactggagcattttatccatttagcgtatctactgctggtatgtttggctttaaatctaacattttactttttgttttctattcgccccttgcccacctttcattttcctgctcttatttggattgttttttaatcattctttttacccccatactagtttaaaagttatatacattgtttccagaaatttcatcatgcatattttcaaattataaaattagtcaacacttttatcctcttctaatgatataaagactttagaacacaaactccatgtgccttgtgcctgattatatgctattattgttgtgccttttaattttatgtattcttaaatccccaaagatattatcattttatagacttagtgttcattacatttatctatatatttaccactatcatttactttcattttacttccttcttgcttctcaggcatcctgccttgaatcaaccatcccctcctcaggggcctcccttgaacactgtatctaaagcagtcctcctgactgcaagtctctctccatcttattatcctcatatatagatatatatataaatactaatagttacatatataaatatatatacatacatataatatatatataaacaacatctttaagagtaagaattcttaattttggctattgtgtgtttcagttctaaaaattctatttgtttctttttcaaatccactatgtcatgttttgtagttccctgaagaaattttagagcttctctgtctcaaactcctgggcccaagagatcctcccgccctggcctcccaaagtgctgggatcacaggcttgagtcactgcgcctggcctcacccaggactttcttaaaaccctcccagatgaaatgaaacacttttattccctgtggcttaaggaagaaagaccaggggccaggcatggtggctcatgactataatcccatcgctttggtaggccaaggcaggagggtcacttgagaacaggagtccaagaccaacctgggcaacacagcaagaccccatcgctgcagaaatacttaataattagccccgcacgatggcgcgtgactatagtcccagccactggggagactgaggcaggagaatcgcttgagcctggagttcaaggctgcaagtgagccatgattgagccacttcactccagcctgagacaagatgagatcatatcttaaactaaaagaagagaataaagataacacattttagtctaacattctgaggacagtccataaatgctttccctccaaacatgtctgtggtttctctattttttttttttttttgacggattctcactttgtcgcccaggctggagtgcaatggcgtgatattggcttactgcaacctccacctcctgggttcaagccattctcctgcctcatcctcctgagcagctgggactacaggcatgtgccaacacacctggctaatttttgtatttttagtagagatggcgtttcaccatgttggtcaggctggtcttgatctcctgacctcaagtgatctgcccacctcagcctcccaaagtgctaggattataggcgcatgccaccacacttggccaatttttgtaattttagtagagacaggcttttgccatgttggccaggctggtcttgaactcctgacctcaactgatccacctgcctcggcctcccaaagtgctgggattacaggcatgagtcactgtgcccggccccatttttatcttttctactgtattttgactgtactttttctgtttagatatgtttagatacacaaatacttaccattggtttatagttgcctgcagtgttcagtacagtaacatgctgtgcaggtttgtagcctaggagcaaacagctccaccatctagcctctgtgtgcaggaggctatgccatgtggctttgtgtgagcacactctgtgatacccacacaatgacgaaatcacttaatgatgagtttctcagaatgtatccccattaagtgacacacgattgtgttttgatagccccctagatgtaagtaaagaaggtataaaaagtttaaaaagaagtcattaatggtgaaggcagggggagaaatgaccattttaaaataacaaagatgccaccaaatcttttttcagtggaaattggagaaagacctttgtggctcagaatgaactggctggggagggaaagcctttatggcagctttggctgaacagctttgggctcagagtcgatagatgggtcaagggtagaggaatgagaaggatggagccgggagtgtgaccctaatgggctgtcccgcggaaggggcggtgtttggagagagaatttataacatggaagaggggcaggaattcatcagagctcgaatatgtggaattccatgaagacctagtgaaaaatagacaaaatgaggagtaggaaactgagtgtttttgttttggctacagaagctgaggacaccttggagctttggagggcacttcggagggcaagggagcagaagtgccctccgacagcctccactagggagccccttcccatgttggcatcataatagagataggccacatgcagaatactcactgatttatcagcaaagcagctgctgaaccagcgctcacaccgggggaatgtctggggaggagtttgggaaagggttatgcctcaggcaaaggtgaggtcatgaggacaagatttttgtgtagggataaaagggctcattgaacttgtgtggggcaagcctcgaggtgtggtgtgtatgtgttctttcacctaccctggttgaaaagaaggcaaataatgggtattttgtcttgctttctctgcccattggcaaccctgcatggaaggaacaatgatgcgggaaatggcacaagctcatgttcctggtgagctgtcagttggctttggattggactggcggtcacatgtggaagcagagatggctctctttgcttttactattttctagaaagattgggcttactcaagatgaaggtgggagaaaaacaaggtgtcaacccacttctctaaggaaatttagcaaactcttttggggagagctaaagatttaaggggacaggttgtatctacaaagggaagcctttatcctggcttgtgggagacctgtatcctaaagtaaagctgaccattgcatgcaccttatctatatacacagaggcctgctcagcagccagggagatgcctgcacagggaaccaccagggcagaaaatccctcaactgacacagtacacaccaagtaccagtagttcctcttcctaaaatcagaacagatgactagatgtgaacaagcaacaagggtcattaggcatgatgaaagaaattgcaacatgaaagagagatccagataagcagagaagctcaagggaaactgagataacagaggactaaggaagttttaaaagaacaaaatgccatgagaaaagaaagtacagtcactaaataagagccagactaaacatgattaccagaatttaaaaaatatcacaagggctgaaagatatatttgaggaatctctcagaactaaggaaacaaacgattgggaaatggagagaaaaggtactagaagtggaggacccatccaggaggtccagccttaggtcatcaggaacctcagaaggatacgagagacaccagaaaggaagaagtgaatagctgaagggcatctgcagacctctgaagaccttggtggattcactgcagaggtacccactgcagcgaatgaaaaaaagacccccacacctacacatattctaatgaaataccagtcaacctagattgatgagataggccagatgcagtggctcatgcctgtaatcccagcactttgggaggctgaggcaggcagaatgcttgaggccaggagttcaagaccagcctggccaacatggtgaaaccccgtctctactaaaaatacaaaaattagccaagcgtggtggcacactcctataatcccagctactcaggtggctgaggcacaagaattgcttgaacccagaaggcagaggttgtagtgagctgagatcgtgccactgcactattccagcccctgggtgacagagcgagactctgcctcagagagagagagagagagagagagcgagagagagagggagggagggagggagagagagagagagagaaatggtacacctgtacagggcacttaaccatgaatagagcttgcaggactggaaagaaattgctctgggtgagtcagtgagtggtgggtgcatgtgagggcctaggacattactgtacactctcgtagactaaatactgtacaattaggctacatttaaattatttttaaaattgttctttcttcaataatagattaattttagtatactgtaactttttactttataaactttttaattttttaactttttgacttttttataacacagcttaaaacacacattgtacaaatattttctaattttatattcttactctcaagcttttttctattaaattttttttaaactttctacacattttttaaaaaaatgaagaacaaatgccacaggagcctaggcctgcagagggacaggatcatcaatgtcactgtcctccacctccatgtctcatcccactggaaactcttcagggtcagtaacgtacatggagctgtcacctcctgtgataacaatgcctgcttctggacacgtcctgaaggacccgcctgagcctgttttacagttaactttattttgttataagtagaaggagtacactctaaaataacaataaaaagtagggtaaatacataaaccagtaacacagtcatttactatcattatcaagtattatgtactgtccataactgcatgtgctaggctttcacaggactggcagtgccgtaggtttgtttacaccagcatcaccacaaacacgagagtaatgcattgctctacgatgttacaatggctgtgacatcactaagtgataggaattttttggccccattataattgtatgggaccactgtcgtatatgtggtccattgttgactgaagcattgttatgtggtacatggctgtatgtttttgtagttatgacactgccacaaaaacacattggtcgcaggagcagatgtttgagaaaaataaaattataaagatgaacatgatttcaaaaatgtttccttcctctactacaacaaaaaagcacatgtctggccacacatggtggctcatgcctggaatctcagcacttggaaggccaaggtgagtggactgcttgagcccagctcaagatcagcctgggcaacatggtgaaatcctgtctctaataaaaatacaaaaaatagccaggtgctatggcacgtgcctgtggtcccagctactcaggaggctgaagcggaggatagcttgagcctaggaggtggaggttgcagtgagccaagatcgtaccactgcacttcagcctgggtgacagagggagatctcatctcaaaaaagaaaaagaaaagcacgagtctggcttagtcagcatgtaatagcagagtcaaaaccaggctccagtaattggaatcactagcatttacttaagcaccaagcttcacatgcactagctcatttgttgccccacaccaatgctatggagggagaaggaggagttggagagaaacagaagtcaataggtattcagtcaaccattttgagctgaaaggctcaccgtttaaaacattatttcccccttattacaaaagtgaataggacacttggaaatataaaaacatacaaaaggccaggctggtggctcacacctgtaatcccagcactttgggaggcctaggcaggcggatcacttaaggccaggagttcaggaccagcttggccaacaaaatacaaaactagccggatgtggtggtacatgcctgtaatcccagctatgagtggggctgaggcatgagaattgcttgaacccaggaggtggaggctgcagtgagccaagatcgcgccactgcactccagcctgggtgacagagtaagactctgtctcaaaaaaaaaaaaaggaaaaaaaagaaaattaaaattactcattgtgatggttaattttatgtgtcaccttggctcggctatggtgcccagttgtttgctcaaacactagacgttgctgtgaagtattttgttgatgtcgttaacatttacaatcagttgactttaaataaaggagatttactctcagtaatgtaggtgagcctaatctaaggccttaagatcaaaaacaggtttctcaatgaaggagttctgcctcaaaactgtaagatggagatcctgcctgggtttccaatgggctggcctgccatatgaattttgagcttgcctgcccccacaattgtgtgagccaatttttaaaagaaatctcactctctctctttttctcactatcctattggttgcttctctcgaaaaccctggttgaaacacttacaatctcatctgccaaagatatgttctattaatattttcccattctgccttttttctatgtacttacagtacatatgtaattttatatagctacacacatataattttataatttatataaaatatggccgggcgcggtggctcatgcctgtaatcccagcactttgggaggctgaggcgggtggatcacgaggtcaggagatcgagaccatcctggctgacacggtgaaaccccgtctctactaaaaatacaaaaaattagccgggcgaggtggtgggcgcctgtagtcccagctactcgggaggctgaggcaggagaatggcgtgaaccccggggggcggagcctgcagtgagccgagatagcgctactgcactccagcctgggcgacagtgagactccgtctcaaaaaaaattaaaaaaaatttaaaaaatagaatatataaatatataataataaaaaatataaatatataaaatattcatatataattatacaaaatattatataattatacatatattagttacacatattaattatgtatgtttcctatacataattatcatatataccatatgtatatataccatatctctctctcttacatacacacacatacaagattctttttgacatgagaaaatagccaccatatatatatatatatatttttttgttgttgttgttgttgttgttgttgttgtttcacaatgttgcccaggctgatctcaaactcctaggctcaagcaatcctcctacccggactattaccaattggccaattaccaattacatacataccatacataggtatatatatacacgcacatacacatgtaattatacaaacacatacatttatacatacatactagaatgatcaactcatttcactttgcctaggacattcccaattttagcactataagtcccacatcctgggaaacccctcagtcccaggcaaactgttatggttggttacacacacacatacacacacacttttttttttttttttgagacaaagtctcgctcttgtcccccaggctggagtgcagtattgcaatttcagctcactgcaacctccgcctcccaggttcaagcaattctcctgcctcagcctcccgagtagctgggattacaggtgcctgccaccatgcctggctaatttttatactttcagtagagacagggtttcaccaggttggccaggctggtctcaaactcccctcctcagctgaaccacccgcctcggcctcccaaagtgctgggattacaagtgtgagccaccgtgcccggccacacacacgtcttaaaaaataaaattgtaatcattttctatgtgctgttttaaaacctaaactcattacttaaaatatattgtggccaggcaggcacgcccctgtagtcccagctacttgtggggctgaggtagtaggagaactgcttgagtccaggagtttgagaccagaccagcctgagcaacattgtaaaaaaacagacatatggtggctattttcctatgtcaaaaaggatcttgtgtcacatcatatttaatgactgcatttccttccatttcaaggatatatcctttcatttaactaattccttattactggatatctaggtttccagttttactattttatttatttatcattttttgagataggagacagggtcttactctgttgcccaggctggagtacagtggcgtgatctcagctcactgcagcctcgatctcccatgtagctgggaccacaggcgcataccaccacgcctggctagtttttgtattattattattttttttggtagacatgcagtttcgccatgttgcccaggctggtctcaaatttccaggttcaagtgacctgcctgccttggcctctcaaagtgttgggatcacaggcatgaggcactacccccagcccagttccactattttaaattgcctttggttctaaaactaacacaggccaaaacagtatgaaaaaaaaatcacaaacacccaaagtgcagactgcagccctcaaggagagccaggctctactttaatttaccatttattaccaaagttattaaaagaaaaaaaaagtcaggctgggcgtgatggcttacacctgtaattccagcactttgggaggtcaaggcaggcagatcacttgtggtcaggagtttgagaccagcctggtcaacatggtgaaaccccgtctctaccaaaaatacaaaaattaggcaggtgtggtgagccgcccctgtaatcccagatactcaggaggctgaggcaggagaatcacttgaacccaggaggtggaggttacaggtgccgagactgcaccactgcattctagcctgcgcaacagagtgagagtccgtcccaaaaaaaaaaagtcccagtctcactttcagacacctgtgccactatgctgtgcatgaccataggtgaagaaacccagaaagaactgagcaacctctctccattctgcctataaccacaggcagagtgactcattatactcaaaaagtcattaaatcagctgggcgcagtggctcatgcctgtaatcccaaaactttgagaggctgggatgggcagatcacttgagcccaggagtttgggaccagcctgagcaacatagcaagaccctgtctcgaaaaaagaaaaaaaaaaaaaaagaaaaaacattaaatccttacctttttaattcattcacaattgatttatgaacttccactgcgattttgccatccgagtgtgttttgagttcttggcatttggcacgtaaaatctccagctgttccctgttctccgccagctccttttcctggccgtgggtttttgcctccaggagcattagttgtttagtcagcttagaaactgaaaatcaaaagaggaagataaaaacttggcacagaagacctcacaaaacacaattatgggctattaggaaatactaatgagagtcagctgataaaaatgaccttttaaagatcttttgagccagacgtggtggctcacacctgtaatcccagcactttgggaggctgaggcgggtggatcacgaggtcaggagttcaagaccagcctggccaagttggtgaaaccctgtctctactaaaaatacaaaaattagccaggcgtggtggcaggcgcctgtaatcccagctattcaggaggctgaggcagagaatcacttgaacccaggaggcgagaaggctcagtgagctgagatcacgccactgcacttcagcctgggcaacagagtgagactctctcagaaaaaaaaaaaaaaaaaaagatattttggagtgttataaattaacaccaaaggctttgtccttagaagttactgtccatactaggcacagtgactcatacctgtaaccccagccctttgggaggctgaggggagtattgcttggggtcaggagtttgagaccagcctgggtaacatagtgagaccccatctctacataaaaatttaaaaattagcagggcatggtgacatgcgtctgtggtcccagatatccgggaggctgaggcaggaggactgcttgagcccagaagttcaggactatagtgagccgtgactgggccactgcactccagcctggatgacacagcgagaccttgtctccaaaaacaaaaaccaaaaaagccaaaagaaattactatctctacattaagcactcactaaatatatactttttaaaataaaatccactataatattttaccaaacatgattccagtcttcaaggaactgactttcctaagagtaaagccttaaatcacacccaggtgtgtaagtatatgtcataacgttgtccctaaagctgcaaaattttcaagatttttaaggacatcaaacatggccaaactaagaactggatttattattctccttccctttcgtcattaaacttttattttatgtcttgtatctaaagtaagtcataaatattttcatcctgtgttacatggttgcatgtaataattcccaagcgtctgccgacactagcacttagaggtatttattatagcataaaactgtacatctctctactctatgaaaatatctaattggtggctgggcacagtggctcacgcctgtaatcctagcattttgggaggccaaggtgggtggatcacttgaggtcaggagttcaagaccagcctggccaacatggtgaaacacccctactgaaaatacaaaaattagccgggagtggtggcgcgtgactgtaatcccagctacccgggaggttgaggcaggagaatcgctggaacctggcaggcggaagttgcagtgagcctagatcatgccactgcactccagtctgggcgacagagtgagactgtctcaaaaaaaataaaaagaaaatatctaattggtcaaagtgaatcgctgtttctgggcaatgggaaaatagcacaggcaactcactgaatcatagaggtcaaaaggttttccctgccccatgtgaccagaaatcctctttctgttcagatctggtatattcaagaaaattaagctcagtaaataggaaactaatgtcatccctaaccctgaaaacaaagataagaggctccacaactctgtttcccctctcctcttaacaatgccggagtaaaggcaaatactcctgggccatgcaggtctcaggagaaatcacatggaggaaactcctgtgtgcatctctgggagatgctctcatctttaaacacgacctggttctcagaaacaggaagtgctagccctgcaactgcagcaacagcaggggctgttcatggacctgccatgctgtggaaggggctgccattccaaaagcagctggagagggaaaacctccatctgcttctcagggtgccacagcctcatgcaagatggcttgtgtttcagcttcccagcctatgccattcttcactaagaaagaaaaatcagtaaagcaaagggaaaaaatgccactatcttttgtactcatgaattacggttttaaagcagaagcgatgactcttaacctggcccccttacagttgtgcactgtcacagactatgaggctcctaggggttgggggaatgcatgggaagagatgggaagagggacactctcggaaggtgtttgatggaaatctaacctgcagtgatgtcgcctcccaggcccgcagctctgaaggaaggaaggacacaggggaactgtttagaaagtgaatggttctgcttacgcatccaacaaacatctgggaagagaccctgtgttatttcagatgtttacctcacgtgatcattcccatttctaaggtactattttaccccaaaaccagttctgctgagtctagcactattacctacgagtgatttacaaacccatgggatgatgagagacactgtggagtctgaaaaagcaatctatgcattgagggtagtgacgtggaaaggttataaacagccacattccagtcaaaaatgcaaaacatgacttctctcattttcaactggggcccccggcaggagagagatagaagggtaaaatgacaatagtgacatcaatgcatgaccagtcctcactggaaggacctcaccttcttggaggcgctcctggtggctgtccttggctttcctttgctgaatctccaactgctccagcaacaacttgttttcctctaaaaccagttttgcttgagtctgaagctgacgcctgcaattgatttacaagatgaaatactgtgattcaggtgctgaatggttacagaaacactctggaatctaaaaggaagcaatggctgcattacaggtaatgaatatcaagtcatgtcttcatgttaaacatattaacacagcagcaaatcctgccatttgcagtcaggcgaggaaggacagccgtgaagtctgaattacggactgcttcagaaaacgctttcagatgtaaaatttcaaacatgtacagaagtaaagaggatagagtaggagactcctatgtgcacaatacccagcttgaacagtcactaaatggctgatgaggtttcatctgtataaacctctagtcctgctgcccactatattattctgaagcccatatggaacatgtttaaagaatttagaaagttcccatttcaattttaaaatactcctttgtaatcagtagcatatttgcaaaacaaaacaaaacaaaaaaacaaaaaaaactgactctgttagcaggctttgaaatggtttcttttttcttttttctttttctttttcttttttttttttttttttgagacagagacttgctctgttgcccaggctggagtgcagtggcgcaatctcggctcactgcaagctctgcctcccgggttcacatcattctcctgcctcagcctcccaagtagctgggactacagatgcccaccacgccgcctggctaatttttttgtatttttagtagaaacagggtttcaccatgttagccaggatggtctcgatctcctgaccccgtgatctgcccgcctcggcctcccaaagtgctgggattataggcatgagccaccgcgtccagccgaaatggtttcttaaaactgtatgaatctgccccagctttcctctcagcacaaacaaatcctctccttccagtgcaatgtaaaacccagcccagctcagccctcaagatcgcaaattctgattagaatgagctgaagggaccttagaaatcatctagtgaaatgctgaccacccaaagtacactgggcgttaagtttatttactaaagcagtaaataatctcgattttccacttgaaaccctacaggtgaggaggaggaaggagagagacaagatgaaaggagtcaggctgtaacaatggtgtggccccaacagtggtgtgcactggctcctgggcactgtgggggtgcctcttgcctgctaccagcacccagggagtgggctgccatgctgttgggagggggctcgcccaaaactggtctgtgctagcctcctcattcccgccacaaactgggcagctccatgatggtctgttttatgttttagacttatttatttagagatagggtctcactctgttgcccaggctggagtgcagtggtgaaatcttggcccactgcaacttccacctcagcttcctgagtatctgggattagaggcatgcatcaccacaccaagctaatttttgtattagtatgttttggtagagacagggtttcaccatgttggccagcctagtctcgaactcctgacctcaggtgatcctcctgccttggcctcccaaagtgctgggattacaggcgtgagccaccatgcccagccgcattttggactaatttataagactttttctttatttgttcattcattcatttgttcacgccttccttcctcccttccttcattcatttcactttttattttttagaaacagggtcttgttctgtcacccaggcaggacaggagtacagtggcgccatcagagctcactgtagccttgaattcctgggcttaaccgatcctcctgcctcagccttctgaatagctaggactacaggtgcatgccatcacgcccagctaatttttaattgttttgtttttgtttttgtttttttgagacaaggtcttgttctgtcacctaggcacagtggtgtgatcatagctcactgcagccccgaactcttggcctcaagtgctcctcccacctcggcctcccaaagcattaggattacaggggtgaaccactaagcctgagccatttctttttaaaatgaaagggatcaatcccccattcctaaaaaagagttcaaaatctcagatttggtttaacactccctcttattttgttttatttatttatttatttattttattatttgagacatggtctcgctctgttgcccaggctggagtgcagtggcacgatctaggctcactgcagcctccacctcctgggttcaagtgattctcctgcctcaggctcctgagtagctgggattacaggcgtgcaccaccacacctggctattttttatatttttagtagagatgcggtttcaccatgttagccacactggtctcaaactcctggcctcaactgatcctcctgcctcagtctcccaaagtgctgggattataggcgtgagccactgtgcccagcctccctcttattttatagagaaagaaacagacccattaagcctgaggtcacccagtgattcagggggagttaggaaaagaaatatacaaaatttagttgcaccccagaagttcattgagaaattactggcaaccaagcagaaagcgtctgctgggccaggtgcggtggctcacgcctgtaatcccagcactttgggaggccgaggcgggcagatcacctgaggtcaggagttggagaccagcctgtccaacgtggtgaaacctcgtctctactaaaaataaaaaaaaaaattagccaggcgtggtggtgggcgcctgtaatcccagctactcaggaggctgaggcaggagaatcacttgaacccaggaggtggaggttgcagtgagtcgagatcgcgccactgcacttcagcctgggcagcagagcaagactctgtctcaaaaaaaaaaagaaagaaagaaagaaagaaagtgtctgctgaagtgtgaagtccgtgtaccgagtgctgcatgcaggtttagcagccgtgcaggtgtgcaggtaccgagagcggcaaggtctgcccaccaagtgtgatgctccagagcccagagaccctcctgcagctggagggcagtgaattcaaagtaagaggctggcggccagggaggccctgagcaagcctgacactctccccatgctggcgtgggccatcacactggagcaaagggcagatttcaaatcccaacaaatgcaggattggggaacactgcggggctgtggatttgaaagcagggcctgcctttctttcctttctttcactggttttattttaaggaaacgcagacaagttggatttgtggctgtatacaatgctagggaaggaatctggggttccagaatctgccaaggtctcttgagccccagcctggctaagctgctttccagtccactgttcaaggagggtgcgaggggagacacactaggaaccctgaaggaagaaaatccaagctcagccagggaggtcacagagcaccaagacccaggagctgcctgagccagtcccacctgacgcatcggtgaccacaaaatcagggagagccaatggtaagaatgctgttgactcaattccagatttctaaacatcacatatagaaaatacttcattttttccagtgatgttaagacatttgaaaacactaaatataacatagctattcaaagtgagtaatttttgttttcttagtcctgcctggatattgcttttaggcttttcaagacatgtactttctctaattcagttaacaggcatttgctgttgctgtgctagatgcggggccacacacaaaaatgagcaggacattggttcctgcccctgaggagttcacaaaggagaagatggaggcagatgtggaggcagacaggataggcaggcgcagtgtggcaggtaccgggacagggcatgtgtttaaggctacatcagaaccggagacaaaggggccgggtgcagtggctccagcctgcaatcccagcactttgggaggccaagacgggaggatcactggagcccaagagttcgagaccagcttgggtaacccagtgagactctgtatctacaaaaaattttaaaaaatggctgggcatggtagcacacacctgtagtcccagctacttgggaggctgaggtgggaggatggctttagcccaggaggttgaggctgcagtgaggtatgactgagccactgcactccagcctgggtgacagagtgagaccctaactctaaaaaaacataagaaacagagacgccaggcgcagtggctcacgcctataatcccagcactttgggaggccaaggtgggcagatcacatgaggtcagaagttcgagaccagcctggccaacatggtgaaaccccatctctactaaaaatacaaaaattagccaggtgtggtggcacgtgcctgtaatcccagctactcaggaggctgaggcaggagaatcgcttgaatccaggaagcagaggttgcagtgagccgagatcacaccgttgcactccagcctggccaacacagcaagactctgtctcaaaaaaaaaaaaagaaaagaaacagagacaagggagcaataatggcctctcctgaaggcagtgctatagacaagtgccattacagtaggaccctagaggatgaggagtgcagaaggggctttcggaggaaggacagattggaagtggggcaacctcagttgtcagggaatctgccagggcaggcggatggaagctggtcgtgcaagcctcatgagctttctgttttgggaggccattttgagctttctgttctgaaaccctgggagccatcgctggggcctaagaagggacgagactctccaggtctgagatggaaaaatcaccctagaaaaataccaactcagaaaataaaaagcagaaagcaactgtatttcaggtttgagaacctacttagaattttaaaagtcatcttgaaaatgtaagtttagaataatttattagggttttattgtaccttattaatttcttagaaactctcccgtaaaatattttagttaagaatgtaattatgtatttgataattttataacatattttcctgttaccatttgttttaaattagcaaaagagcagaaacacaatgccacttgccattcctcactggtaacagcactactcttatttaactcttggtgcaattcttcattttctttcaccacttcttggactcgcatcctaaacattctcatttcctcctgaaataaaatgtacgtaaattataacacacacatacccacgcatctatatttctcagttctggtgctgctgctgtggctaaaatcaaatggtaacagccatttagcaaggtctcacaacaggccagccttcaactctcggtaccagcaccagtggtgcctgctctcagggagcttacggtctagtgagaaagcactaggaccaaatgcaaggccaagtacaagaggcaaagaacctgggctttcgagtattagattcctaatttgctaacattgttctataactgccgaatactgatagaaaaggcagagatgcccatcaacgctgacatttttcctttgtttgaagatgcaggagaataaattggaggtttttaatataaaaaataagacttttcatccttaattaaagctagatttggtggggaaggggttagttagtgtgggagttggaggaagctctttttttttttttttttttgagacagggtctcgctctgtcacccaggctagagtacagtactgcaatcacagctcactgcagcctcaacctcctaggctcaagcgatcctcccacctcagcttcccaagtacctgtactactatgcctggctaatttttgtattttgtgtatagacgaggtttcgccatgttactcaaggctgctcttgaactcctaggctcaaggaatcttcctgcctcagactcccaaaatgctgggattacagtcatgagtcaccacatccagccaaggctcttagttttgtccatgacaaccatgagaaagtgtcttactagcgtcatcagtctgcagagcttcactggccattagccacaacacgaggtctgtcgctgggccggttttgatgcctaacagtctatgtctgtttcagctcccaacagtctgtgtgtgtgacacttcagctgagcctcctccatcagggcttttccagcttccgtgtcctgcgctgtcctttggtgagaatctgaggtgccaatatttactctggtgtgcctgtaaaatattctactcccagctgtcaggtgtttatgcctacacccttttaacttaaagcagcactgccaagtaacttctcctctcatctctccacccagacacactcactcactgctggcagtccatgtgactcttttttggaacaggggtcaggcaaactaaagtgtgcaaaccagctgcctgtttttataaataaagttttatttatttataaataaaataatgggcctcgcccattatttacatgttatcctcatctgctttcatgttgcaacagcagggctgagcaggtgcaaacagaaactgcatggcctccaaagcctaaagtgcttattaactggcccttgacagaaagtctgtgctgaccctgacttagaaggagcaccaaaaaaataatattattagctattaggattgttatatattcaattagtacaagattcattcatgctcttagaaaattaagcatccaacactcagtctaaatgaaaaggattaaaattcctttccatgggacatggacacgggacagcatcactgattaggaacaagctgggagcctcttaaaggaccctcccagctcaggatcccagaacaaccaacatttctttcgctggatccttccaatttcagggatctatatggacacttaaatgaggaacccagaggaatgcaggaggcacaggaggcatctacaacacctacacaggcttggcctcctgaagttagaacgagctccgctgcgcgaagtcattcccacaaaacggcggtggacaaggcagaaatggataaaaacctcacttctccatttccaacagctcagcaatcagacttccctggggtcagctcatcctagaattaagaagcatctaagtttgcccaaaacatctccagcctttccttcccatgtctgcccaaatagccctttttttttttttttttttttcgagacggagtctggccccatcgccaggctggagtgcagtgatgcaatctcggctcactgcaacgtccagctccctggttcaagctattctcctgcctcagcctcctgagtagctggaattacaggtacgtgccaccacaccagctaatttttgtatttttagtagagacggggtttcaccatgttgaccaggctggtcttgaactcctgacctcatgtgatccacccacctcggcctcccaaagtgctgagattacaggcgtgagccaccgcgcccagcccaaatgtcccttctaatggtggtatttgcagctgcacagtaacaggaaagaagcacttcccccctgctgtcttccctgcaccccaagatctcagcccatatgggctggctgtccagaaagccatggcttctcatgcagcactgctctgaccctccatacctctcccctcgctccctatccacccctcctgctctgccaatcactcccttacttcctcccctcttccttctttccctgcctcccaccctgccacactccttccttcctcctttctgtcctctaataaacatttggttatctataatatgctgggtatacctacattcaaaatgtttttataaaatttgaagcggtcctatatttttataaatcttgtgtcttctgggacatttgccagcctaccttgagggtggcattgagctcgtccttctctttcatcatatcttcataagccagcaacaatggtgacaggtactttatatccaactgaagatagagagtaaaggaaggttaatatatttcttacatctaaacacaaccagaaaatttttaaatggcaagaagttatacttttttgaaatggtttctttggttgcagttgttattgttttttaacgactctcccagctcaggatcccagaacaaccaacatttctctccttggatccttccaatttcagggatctatatggccacttaaatgaggaacccagaggcatgcaggaggcacaggaggcatctacaacacccgcacaggcttgacctcctgcggtcagaatgagctccgttgcccgaagccattcccactctgccgcccaggctcgcgtgcagtggcacgatctcagctcactgcaacctaaacctcccgggttcaagcgattctcctgcctcagcctcccaagtagctgggactataggcatgcaccatcacgcccagctaatttttgtatttttagtagagacagggtttcaccatgttggccaggctggtcttgaacccttgacctcaactgatccacccgcctcagccttccaaagtgctgggattacagacatgagccaccgcgcctggcctgaaatggtttttaatagctatgcaaatataccctgaaaatatgggcctgaaattaaataactttcacttaccaaccagggtggtatagggcccttggatgggaggccttcaatatttaagctctaagaacaaaacatgtattgaagacaagttaaaccacacttcctctgaattttcaagtcttagatattcttaatctagactgggcattgcccatctatgcatttatctgtctatccatctgcctacccacccacctacccacctacccatccatccatccatccatccatccatccatctatccatccatccatccatccatccactttcccatacacctacccatctatctatctatatgtatatatgtatatatgagagaaatattttttctgaaatgttttagagtaatttgcagatataatgccccttttcctctaaatacttgtatttcctaaaaacaaaaacattcatttacttaaccacagtactgtcatgaaaatcaggaaatcaacacagataacaatactattttcatatatatatatatattactgctccttgcagagcaggggtaccccataggcagtgtgcctagagtagcctataatactattttttaacctaacctaacctatatgttatcttcaaatttcatctattttcccactaatgttcttttctaatcaaggatccaattcagggtcacatgttgcatttagctgtcaagtcttttatgtcctttttttttccttctgagacagggtctcattccatcacccgggctggagtgcagtggtgagatcatggctcactgcaacttctgccttctgggctcaagcaatcctctcacctcagcctcctgagcagctcagactacaagtgcatgccaccacacctggctaatttttgtattttttgtagaaatggggtttcaccatgttgcccaggctggtcttgaactcctggcctgaagtgatcctcctgcctcagcttcacacagtgctgggattgcaagtgtgagccagcacacttggctttttttttttttttcttttttttttttttttgagacagtctcgctctgtcgcacaggctggagtacagtggtatgatctcggctcactgtaacatctgcctcccaggttcaagcaattctcatgcctcagcctcccgagtagctgggactacaggtgtgtgccaccacacctggttaatttttgtatttttagtagaggcgaggtttcaccatattggccaggctggtctcgaactcctgacctcaagtgatctgcccacctcagcctcccaaagtgctgggattataggtgtgagtcactgcacctggcctccagccctttttagtcttttaaaatctagaacatatctagtgactgttttcactggatatggaactttttaatgtcacattgttgagtgtctggattttgttatcttcctttaaagagtactggtttcttttccttccgcccttccttcctccctcctctctctctctctctttttctttcaactcctaagttgcttgtggatcaccttcatgcttctgaggcttgttttttcaccctggtcatggtaggtctgtagtaacctttcctaaaaagctcttttagccatacatctcaggcacggccctcctgggctcttgactcaatgcaaggtctctccattgtggctgggcagaactcgaaggttcccggtgctgtgtgagctctgggaaccatgcagctcacagctccctgttcttattttctgcccagtatcttgcagtctcatcctacacatgtgcagggtggtattccacaagactccaaggagccccatgcagatttatataagtagctctttctctccaggactccattctttctggtattcttgccctacgaattctagtctcctcagcttccccagactctcatctctgttgaactcagggaagggctcagctcaggcccttcctccctgctctgtgatctgagactgcctccagacagaaagcagatcacaggctcatctatttatcctgctactcttgagggtcataggctggtgctgcctgctgttcgacatctgtaaacatttgcattacatattctgtctggttttctatttgtttagattaggagggaaaatctagtacagaatcaatggcctagacaaaataattatttatttcacaaaagctttacaatgtgaacaccttaatatctatgtaattactcactcactctgcaaacattggcaactcactaagtcattatggacactgcaacgcaacccttgttttcaaggattctatgacctagtaacagaaataaaatccactaacacaaatgtacgtgatatacaaaaacagtatagggtagaatgctataagtgccttaagagtgattacaaacaaaagtctgcaatggtttaaaagagagagagggccgggcatggtggttcatgcctgtaatcccagcactttgggaggctgaggagggtggatcatttgaggtgaggagtttgagaccaacctggccaacatggtgaaaccctatctctactaaaaatacaaaaattagctgggcgcagtggaacacgcctggaatcccagccactcaggaggctgagaaacaagaatcacttgaacccgggaggtagagattgcagtgagctgagattgtgcatgctgcactccagcctgggcgacatagagagactgtgtctaaaaaaaaaaaaagagagagagagatcaatcacttctggctggggtgatcagggaagactgtcttggagaacatggcatttgcacagggcagaagacaacatgggagaaggctgtccctgggcctgtctgcccgccccatggtcctgcagaaggccctgacctagcaagcaggttttgaattataggaccctaagaactttatttgtttttgtttaaaagttagtattatgttaagtgaaagaagtcagtcacacaaagtcatgtcttgtatgatttcatttctatgaaatgttcagaacagacaagttcatagagacagaaaatagattagtggttaccaggggctgagctggaggaattgggcagcaggggaacatagggagtgattcccaacaggtatgacacttccttttttttccttttttttttttttttttgagacagagtctcactctctctgtcacccaggctggagtgcagtggcatgatcttggctcactgcaacctctgcctcccaggttcaagcgattctcctgcctcagcctcccaggtagctgggattacaggtgcgcacgaccatgcctggctaatttttttgtatttttagcatagatgggaattcaccatgttggtcaggctggtctcaaacgcctgacttcaactgatccgcccacctcagcctcccaaagtgctgggattacaggtgtgagccaccatgcccagccaacatttcttgatttaacaaaagtgctctaaaattgactgtggtgatggttgcataattctgtgactacaataaaaaccactaaatggtacacttttaaaatgggtataaattggatggtatgtgaattatatttcaaagctgttattaaaaaaaaaaagtgaaacgtaagccctccttcaaaaagcaactcagaagcccatgaggcctgaactcccaggagccatgggagaacaccgtgtgccttcccgccttctaccccagcaagagcccagccagcggtgcctccctctcctgtgtccacagtgtcactcacatcttcacagccccaagttctgtaagagtaaggacctgagcatcggttcatctggcactcctcccggcatctcatgcagtgacctgctcagtgagagtgtgtggagttggactctgcaactgttcttagaactgaaaactctgctttcctttcgaagttaatgcactgacaacagctgcaactttcaggaacgtgactgagaagggagcagccgacatacactttcattcttttacttttgttattttttttttaatttttgagacagggtcttgctctgtcacccaggctggagtgtagtggcgcaatctcagctcaccacacccttgacctcccatgctcaagagatcctcttgcctcagcctcctgagtagctggggctacaggcatgcgccaccatgctcagctaatttttttaaattttttatttgtagagactgtctcgccatgtcccccaggatggtctcaaactccagagctcaagcaattctcccgcctcagcctctgaaagtgctgggattataggcacaagccacctcatccggcctcttttactttgtacacttctgtattgtcccaatgttttacagtctttattgcctttattacggggaagaaggaagggaaggaggcaagaaacagaatggtccttagaaacattgtgccttggacagagcttttcttacatcaaattataataaataagaacctctcaagattggaaatcaattcaacagtaaaggcttaaaaatctgaaaagctgattttcacaatcggaaacgttacctcttccttggacaaatgcctgaattttgtctgatatcgactgagttctacattcaaacgatggacagtcattttcaatccatcattttcatccaccagttcttgagcttgttttcgcagataaagtaattcaggtgcagcaactagggaaaaaaatttaatattatactataagaaataacatccaatttatccagattttattaaattgcaaatcgtttgcttttctcccctctttcacgctcagaggcaatgaactgtgtgtgcgtgtgtgtctgtgtgtgtatgtgtgtctgtgtgtgtgaatgaataaaagttacaacgttttttaacactgaatagttaacgttatattgaaagtttgtggaagtttttgcatgtacaataaagtaaaataaaaatttcaagttggaaaggaatagtcattgtttcagatgacataagaatatgtgctttgaaaaatcatacagaggccgggtgcggtggctcacgcctgtaatcccagcactttgggaggccgaggcgggtggatcacgaggtgaggagatcgagaccatcctggctaacacggtgaaaccccgtctctactaaatatacaaaaaattagccgggcgtaatggcgggcgcctatattcccagctacttgggaggctgaggcaggagaatggcgtgaacccagggggtggagctcgcagtgagccgaaatcacgccactgcactccagcctgggcaacagagggagactccatctcacaaaaaaaaaaaaagaaagagaaaaatcatatagaatacatggaaaatgtattagagctaataaccttcccacataatagcaatgtcctattagaaaacaaaacagaaaatagatcccacaaggtaacagcacaaataatatatagtatctaaaaataaatgtgcctaagataagaattatgcagggtctatgtgaaaaaaactgacaccaccttacttaaagctatattagttttatataaatagaaaaaggtatagagaaaatattggtgaatatttatataaccttagagttaaaaatgacttaataccaagagtgtaagtcataaaagaaaaacattttattgatttagcccaattatcaacaaactaagaaaatattacacctatgacaaagggataaaatctttcatatgtaaggagttcctgcaaatcaataaaaagaagtcaagtgtctcattgtaaagtgggcaacttggccatgatagtggctcatatctaaaatcccagtgctttaagtggccaaggaggaaaaatccttgaggccaggagtttgagaccagcctgggcaacacaatgaggcctcactgctataaaaaaaattaaaaaaaaaaaaaacttagccaggcatgatggcgtttgcctttagtcccagctactcaggaggctgaggtggaaggatcacttgagcccaggagttcaaggttatagtgagctctgaccaccccactgtagtccaacctaggtgacaagagtgggatgctgtctctaaaaaataaataaataaagtgggcagctttatgaaagaaaaagaaaatgacttgcaaagatatgaaaaaatattcaagttcaataataacagaaatacaaattaaaatactatttctttttttaacctataaaagtagcaaggaaaatataatcattggtaagtctacggtaaaggaggagcttttttatgcttctcttagggataaaaactgaagtgaaatatatgtaagctaagcatcaagttccaaaagaagtattggaatctctgttttgtttttgtaaattcagcttctttccaacctgaggaatttctttagtgtaataatgatatagcagatgaaatcaaatctcaacaaacataaggatattaacaaaaaaacctgaaatattacaacataaattaccaacacaaatatcacaacataaaatattaactctcaaaataattgagtgaagtcctgctcattcctctaataaaggcactctgtctgtccccaccttcctgtgacgacgccttctcagcctctttgagctttctcttctctttttccattcccttaagttttaactgtagttctttcattgcttgtttcattgtgtttagttcaagggtaaggctttgattcatattgtttaggtccatattttcttcttttaatgcctcaaacttttctctggttatttctgtatatctttgacgtgctctaccagttatatctgaaagggttcaggggaaaattttacaatgttaattgatgttgacaatgttacatcaaaatcaactgactttgttccaaaaaccacatcaggcctggtgccatgttctttggtccctgggaagggaatggcttctacaggaaacagtaagtggcctgatgaagtcacagcgggtggcaggaagagaggtactgaggggaggccagaaagggaggccagagctgcaggaggccgtgcctattgtgatgtggcatggaaagttcatcttgcagggcagcaggagccagcagggctttcaagcaaaggtgtgagaaggaagaggctctgctcttgggtgaatccctcaggccagcagggaagaaggcaggttagaatgaggcctagcccaacagctgaggggcagcactagagtggggacacagagaaaaggacacatgagagcaggactcaggggctggtggctggctgggtgcgggcagtgagagagaagcagacccaggatgaccacccaggtctgtgtctggcagatgctcccccagatgaggagcacactgtgaagagcaggtggggatggaagatgaggagaggcaggcttgggttggtacagaggcccagagtcccagggcagcctctgctggggagactgacgagccactggcctgtgggcagcacctgaaggcaccagggtgaggagaaaaccgaggtcacataggaccttaagaaggaagagcaagaaagtggggtggaaaccagcgctgttccacggggagatgtgctccgaaaggtcacaggaggtgaggctcccatgggccctggccagcgcacctcccaggggagggagaggcggaagcagagcttccacacagacgagggcaggatggctggtggctccagagagcctggcccaacctctgacacacacatatccaatccctaacatgcaaaaggtgaggctcagaaatgggaaactccacagctacatagaaacaagggaaccctgagaaatcccagagataaaacagttgagatgagaatgaagatgggtgccaagcctgaaatgtgccaagagagggcagctagaaaatggggaggggtggctccagggatacaccttgccctggtaggagtggagacacaaagtggcctagaaagagctgatgaggctgggcctggtggctcgcacctgcaatcccagcactttgggaagctgaggcaggaagcttgcttgaggccaggagttcgagaccggcctgagcaacatagcaagagcccatctctacaaaaatcaatcaataaataaaattatatttaaaaagaagcagcttgaagcagctgatgagctgttgagttagataaccagagtgggaatagcaaggggttaacccacctgacccaggcagcaacagcagaaatgtgtgcccctcctcaggcagaacacacaggccctgagggcagaaaggcagggcagggggctggagaaagccaggaggaagaggggtccccacggatcccggtgggcctcacatcctgtccatccccatcagttgctggaggcagcagtcggtacagcctggcagcctgctggctctccctcttcaggcagggtgcagtaaacagaggtagcatccccatgtgggccacagggaatctcagagaccccaagaggtatcaaacagcagagccagagaacaccaatggcaagtgagagaagagaaggggctgcaacacaaaccctaagactggatgcgcatggttacaactttcagagagacgtagtcagtgtcacagaaatcatggaagttaacgtttgattaacaccataaactgaaaggatgggctgagccgcaggatacacatcatgaaaaatgaatgcatggcgcagaagttggagccccagcaatcgcccagaatacagcattgaaaatgctgagattgaaagggtgcaaataaagttaatctgacgcggaggagacttaaaccaggattttcagagcagtgacactgatggcagcagtggcccatctagagtggccaccgcacagactctagagcagggaggtgtggcccaagcctcttgctccatggagcaggcaggagccccggccctccctgggtgctgctgcagctgcccaagcccggctgcagacccgagaatctctgtgttcttgggggcccaagaaggcccccaccacccaccataggctccgaagtgcctgatcccactgcctggcttcaccccactgtgggcacctgctccagaggtatggtcagggctgcatgctccacagagccatcaggagccggggacaagcgggagccctgccccttctgagttggtggggcaggagctcatggggtgctgctacagttgccctcccatgtgtaggacctgggtgtctctgcagtctgcaccctcgggggcctgggaaggctcccgtgtccccgcaggcttatgggtgtttgctctagctgcctggtctctccctgctcctggtgcctgctccagtcttgcagcagggttggagcggggtttaggccaagcctgggcactgtcacagcctggctgggagtgtgcatactcagggcagtactgacacgacagcgccctgccgcctcagccccctccagactttgggcacccatgagcacaggagggaaagacaagggggtgctgaggatggctctgcactggcctgcagttgccccttggtgtgagcagcctgggtgccatggactgggcagcaggagggagacaggttcctgggcagaagcaggcaggtccccggtgaggccccgccttcaggtcggagagggcctgaaggctggggaccgggttgcctgtcccgtgggactgcagtaggaacttatggtgccttttccaggcccacccatggccacccatggaccaatcggtgcgcacttcctcccttctgaggcccataaaagccctgggcttagttggagcagagcagatgagatgaccagctgcagagaggagttcccctctctgctgatagctggagatgtcagaggaccagcagcagagaggagcaacccactccagggcctcctctctactaggagctggtcagaataaccagctgcagagaagaacaaccctctccagggcttcctctttgctgagagctgcagagacagttgggtgacctgccttcagagaggagccatcgactccaggggacctcctctctgctgagagctgaacacttaacgggacgacctgcctacagagaggagctacccactgtgggtctcctctgaactgttctaacatgcagtaaagctcctcttcgtcttgctcaccctccacttgtctgcttacctcattcttcctggacgcaggacaagaactcaggcaaaggcacactggcaccacagacatttccgaccagaaaagcgacaccccaaagatcttgtaacaatgtgggacctaacagcaaaaattataacctccattttggaagccactgaagctccccaaactgttcagggggcataacccataaagcatctctagacctctccctctgccttcagcctcagagcagagcccataactgcacctgccttcccagtacggatcccagtacatcatgggtccactcctcccactgggatcccagcacatcccacaggtcctccttccacccccaggatcccattacatcccacaggtccacctcccttcccccaggatcccagcatatcccacaggtccacgtccccccaggtccaacccccaccctcccaggacccaagcacatcctgtatggacatacgtccactacctagtgtttggaccctctcttttgaggcaagggtgaaagttcaacaactaatacaagaaaaagaaaatgtaatctttattttcagataaaattaatctggatattctccaaaacaagcttttcaatcataatataattcaaaaggcaaatacctggggagggtggaggtttctcacataatggaggtttttcatcctaggaaagaaagaacataagaggaataagtgcagagcattagtgttttataaagtggacacacgcagctaggtcattagacagcaggtatataagcatgctttatttccttcattttgactcttgttctttgtttgttttagctttcaaaactttaatatgtactatttctttttttccttttttaagacagggtcttactctgtcacccaggctagggtgcagtggtgtgatcgcagctcactgcagcctccaactcctgggctcatgaaatcctcctacctcagcctcccaagtagctgggattacacatgggccatcacacctaatttttttttttttttttttgtagagatggggtctcctgttgtccaggctagccttgagctcctgggctcaagggatcctcctaccttggtctcccaacatgctgggattacactgtttcttatacctgaatctgagaccttaagtgtcttcccctctggtgggctctctgaggctataaaggaagtcctgcctgagctttcttcctgcctttctgcactgagttcagtgactgtccttacaggtagatcccgtgagtagcgggctgtgggctcacgttgaaaagcatgtgctaggtagggctgcaagtgctgagcagagatgccctcagcaaactccagccaggcctcttctcactgggatgggcaaaaaggaccccatcaactgcagggaagcacatttgcaaaatgctgagaaaggaacagtaagatattgcttctcaaccccaaacctagaggaaagggaaggctgtgaacttttgttaatttttccttacatggtggtgtgatattaagtttctaatttctgctgacaaagtagacaaggttataaattaactctgcagagaaatgtttaatttttaagttcctatgacatcgcacaatgaaaaacttaagttagaactatttccatgtttgcaaattagttattaaaattctcaggccaggccaggtgtggtggctcacacccgtaatcccagcactttaggagcccgaggcaggtgggatcgcctgaggtcaggagtctgagaccagactggccaacatggtgaaatctcatctccattaaaaatacaaaaattagctgggcatggtggcatgcacctgtggtcctagctactcgggaggatgaggcaggagaatcacttgaatccaggaggcggaggttgcagtgagccgagactgcgccactgcactccagtctgggtgacagagcaagactccatctcagaaaaatatctcaggctaggcacgtcacatcatgcctgcaatcccaatgcccttgggaggccaaggcaggaggatcgcttgagcccaggagcttgagaccatcctgggcaacataacaagaccccatctctaaaaaaaaatttttttttaattagccaggagtggtggcatgtgcctgtagtcccagctactcaggagactgaggcaaaagaatcacttgatcccaggagattgaggctacagtgagctatgatcacaccactgcactccagcccgggtcacagagggagatcctgtctcaaaaaataattttaacaaaagataaaattgtctattcattccacattcattttaattataaagtagtttctaaccctttaatacattactttcatcattaaactatggaaaatatcaatttcctcatgttttaaaagtatttaaggccaggcacagtggctcatgcctgtaatcccagcattttgggaggtcgagatgggcagatcacttgagctcaggagtttgagaccagcctgggtaatatggtgaaaccccatctttatcaaaaatacaacaaattagctgggtgtggtggcatgcatctgcgatcccagctactcgggaggctgaggtgggaggatcgcttgagcctggaagacggagaccgcagtgagctgagattgcgccactgcactccagtctgggtgacagtgagacccccttctcaaaaaaaaaaaaaagcatttaaaagaaatattcaacaggaaagaactcttaagggaagatttatttttgccccaaaatcaccgccaaagtttcaacaccaaagttgttgaaaatttatgaaaaattatgataaaaactctatttattgagaaaatcagtttttaaaaaaaatgatcttacctttaaattcagaacagggtgtttaccatctgatgaagaaaaagagagagagataaacttttaaagtagataatgaaatatgacaactcagaaagtacaatcatagaaattcaccttctacagaggagctcgacaaggcccagaacagggataaaattcacagggtcacagggcaagtgggtcccagagccaggctggggcctgactctaaattgtcatctctctcccatacccatgcctgaccaccatccgtggctcacgtggctgcagaaccaaagccaaactcttcagtgtctccaagcccttcccatgccaggcttctcctctccttccaacacccctccccatcactctccacacatcttcccatgccgggctcctcctctccttccaacactcctccccatcacgctctatacatcttcccatgccgggctcctcctctccttccaacacccctccccatcactctccacacatcttcccatgccgggctcctcctctccttccaacactcctccccatcacgctctacacatcttcccatgccgggctcctcctctccttccaacactcctccccatcacgctccacacatcttcccatgccgggctcctcctctccttccaatactcctccccatcacgctccacacatcttgcccaccactccctggatgggccaacgcatactcctattggcctaccctccctagatgcatcatccaacctggtcagaaaaatagttgttccttgaagcaaactgtctcaacgacagagaggaaaacaaatctcacccacttactcatcttccacacatctgtaatccaggtaccctaggaagcaggtgatcttacaccccagtttgcctgtacacattcatgttgtaaaaagttggacatcgagttgcttttttttttttttgagacggagtctcactctgtccctcaggtggagtacaatggtgcaatcttggctcactgcaccctccgcctcccaggttcaaatgattctcctgcctcagcctcccaagtagctgggattacaggcatgcgccacgacacccagctaatttttgtatttttagtagagacagggttcccccacgttggccaggctggtcttgaactcctgacctcagataatccacctgcctcggcctcccaaggtgcagggattacaggcgtgagccactgtgcctggccctgagttgcttttaactttctactattaatttgcagagcagaaataaccagctgaaaataaactggaaacacatgcaaaaaataggtgaaaaaaccctacaaaattcagacaacagaagaaaatgctagagatacatacaagattctaaatctacttcctggttgggcacggtggctcatgcctgtaatcccagcactttgggaggctgaggtggatggatcacttgaggtcaggagttcaagactagcctggccaacatagtgaaaccccatctctactaaaaacacaaaaattagccgggcatggtggcacttgcctgtaatcccagctacttgggcggctgaggcaggagaattgcttgagtttgggaggcagaggttgcagtgagccaagactgtaacatgacactccagcctgcgcaacagagcaagactccatctcaaaaaaagaaataagtaaataaataataaatctactccctgatgcattgagcaactcgtcactgaagagctcatttttggccaaagtcatcttgatcaactgtttttaaccaaactgctttcagtcaaatgtccaggggcagcctggactgctctcctgcgttggacaccaggtgaaatcctgccctgtccttctgagttcagcttgatgaaccctcctttccctaccaccttccctaactgagagacaaccacctctactgcccaccttagcaccccagactacggtttgcaatctgcatctcctcctctgcagctgggatgcgaggggaaaggcctgtggctctatcatctctgacacacggctggcactgaacaaatttccaatgagcaaatgtttaaagtgatacaataagaaaaaatatatatttttaataacacctttacaatagtcttgatttggtatcacacaatgctacctcagatctgactgctttcatatttaatggagtcttctatgtcccccttaaattcttcacaaaataaaattgggggagcagggagttacatgaaatagaatggcaaaaggttgacagctggtcgggcacactggcacatgcctgtaaccccagcactttgggaggccgaggcaggtagatcggttgagcccgggagtttgagaccagcctgggcaacagagcaaaaccccgtctctacaaaaaataccaaattagtcgggtgcagtggaacacacctgcagtcccagctactcgggaggctgaggcagaagaatcactcaagcctggcaggcaaaggttgcagtgagctgagatcacgccaccacactccagcctggacaacaagagcgaccccgcctcaaaaaaataagaaaattgttgacagctatagaagtggggagatgcataggtggacaagtgggagttcattttactagtctctctacttttgtacacattaaaaatgatcacaataaaaagtttttaaggggcaattcaattttcccaaaggaaatcatgctattttatcttagtcatgaacttttcagaaaaagagtctcataaagattaaacttacaatttacagcatcccaaattcatgttgtatttaatgtacatttaatgtacacgcagttcacttggttctgtgaatctactttgtgtcctgtgttcttatttatcatttctcaaaaagatttccagagtcctcaccctcctcatttctattacctatatgggtgagggggatagacataaaataacagcaaaaggcttcaatactgggcatactcctgctgcatacaaggtgtcatgctgggtctattccagtcttttttttttttttttttgagacagggtctcactctgtcacccaggctgaagtgcagtggtggaaactgcactgcagcctcaacctgccgagctcaagcgatcttcctgcctcagcctccagctgccaggctcagatgatcttcctgcctcagcctccagctgctgggctcagatgatcttcctgcctcagcctccagctgccgggctcaagtgatcttcctgcctcagcctccagctgccaggctcaagtgatcttcctgcctcagcctccagagtagctgggtctacaggtgtgtgccattatgccggctaattttttacatttttgtagaaacggggtctccctgtgttgcccaggctggtctcaaattcctgggctcgagcaatcctcctgctttagcctcctaaagtcctgggatcataggcctgagccactgtgcctggccctattccaatctttatagaaagaaaattcacatgacatgaacacattcttgctgtcaaaaattttaatgacacagataaatcaaaattcacccatgaccataatccctcgaaaccttcccctctccagaggtaaccatggttatcaactgggtatggttcttttcagatatatttgagcatataaggatgtagtggctcatgcctgtaatcccaacactgcgggaagccgagatgggaggatggtttaagcccaggaggtagaggctgcagtgagctatgatcacaccactgtattccagcctgggtggcagagcaagatcctgtctcaaaaaaaaaaagtcaaaccccacaactcaccacgtttcacatgcctacatataagagacattaggtagtggggagggagagtagcatgtgcacaggtccagtggcaggaaggaacaccacagagttgaggaaataaaagaacagcagagtagctggaaagcagtcagcaggggctggcaggccaagcagatggtgggacaccatggaagagatccaatttaaaagggtctggggtatgtgggggtgtgaagggacgcatgtgggggtccgtggacgtgcaaggggacactaccagctttgtgctttgaaaagatggctctgggccagatgaggtgtctcatgcctgtaatcccagcactttgggaggccaaggcaggtcaaatgtttgagcccaggagttcaagaccagcctgggcaacatagtaaaaccctgtgtctaacaaaatacaaaaattagccaggcatgatgatgcacacctgtagtcccagctattcaggaggctgaggtgggaggatcaactgaacccaggttgaggttgcagtaagccatgatcataacactgtactccagcctgggcaacagagtgagaccctgtaaaaaaaaaaaaaaaaagactcttcttctgactgaggggatgaatgaatgaagtcaaatggttacatggcatagaagctgcgaaaggaaacctgggcgcagcacacaacgaatgatagcaaactggggagcaggctgtgagtgcttcgaagagtaaagggcctagactgaggagatgacgggtggatgcccaggaaggcaggaggaaacgagatgtcctgagcccagggagaaggtatgttaaccacgtggtatgctcctgagacatcatcagatgaagccagaaaaccatccagtgcacttaactacatgaaggtctctggtccagtggtgcgatggggagggaagccaagctggagaggtatgaggagacatggagagggagaaggcctggagaggtgtatcacttgacaaagctgttaaggagaagaaggaggaagtactagcaagaggggactgtgggatcaaagaagggtctgcagagaatctaggaaaggggaacagcgtccacgagcatgaatttggcagctctgaccaacggtacaagggccttgcccaaagtgtgtttggtcttcttggcagaggtctcgctagagtgcagagggatgcaccaggtgatgaaagcttcaggctttagacactaatcatcactagcactgatggaagccactgcactttacattgtcacttcatttatgagacagacactctagattgaggagaaaatgaggtaagtaagttagccatgcctagaaacgacagagtcaaggaccaaaccaccaaaagccagggttcctcatgtgttgtccaaggatcacccacaacagactcctctgtgtacttgtgaaaagtacagacccttcgagaccagtctgaccaacacagagaaaccctgtctctactaaaaatacaaaattagccaggtgtggtggtgcatgcctgtaatcccagctactcaggaggctgaggcaggagaatggcttgaacccaggaggcggaggttgcagtgagccaagatcgcgccactgcactccagcctgggcaacaagagtgaaactatgtttcaaaaaaaaaaaaaaaaaaaaagtacagacctctgggcccagccctgagccactaaattacagtttggggtctggggtttttcagaagtatgcaggggcttttaatgcccaccacaaaccaggcatcactgcaggagctgcaatccctcccaaccaccacctgtgtgccaggtgcacgttcccaagtatgtgggtggccacggcctctcatctccaaatccaccttcatggccagctcatgttactgcagcatttccacccagccagttggtaccatggaaggcttcctctgtagagggtgctggagagacgctggaggagctggggctttgctttctgattccagcttcctctggctcttccttccatgcattaatttctttttttaatttctggttttagagtccaagggtctcactatattacccaggctggattcgaactcccaggctcaagtaatcttcccgccttggcctcccaaggagctgggattacaaatgggatttcatgcgcagatcctttctttaattttttgggtggccagcaacatgcagtacctccccatggtggcttctcctggccccctatcccagtgagtttcattagggcagcccctcagcaaacttcttggccacccggcaggccacagctacatcctctccaggaaggtgtggatcttgggttctggctgaggctcctccagagctgcttcctcctgaagcatcagccctaggagcagtggctgctcccctgagctgctactcctgaattcttcagtattctctttactccttagtaggcaatcctgttgttattattattattatttttagagacagggtctcactctgtcacctaggctggagtgcaatggcactatcacatctcactgcagccctgacctccttcctgggctcaagtgatcctcccatctcagcctcctgcatagctgggactacaggtgtgagccaccatgcgcagctcccaaacctgttattattaatcattctttatagtaaattttccctcttcaagtcattgtgtgtgttctgactcctgattggaccttgactgatatatgctacatcaggccacacaatgcagatgttacacaaggcaggagagaaccaaatctggggacatagaaagacatttggcatgtgttgtgagatgaaagaaaggtaacaaaacagcatgcactttatatacatatactctctaaattgttaaaaatcttatctgtgggagcacaattaagtgtgtttagctttatgatatggtctggctgtgtccccactcacatctcatcttgaattgtagctcccataattccctcatattgtcggagggacccagtgggagataattgaatcatggggcggtttcccccatactgttctcgtggtagtgaataagtctcatgaaatctgatggttttataaggggaaacccctttctcttggttctcattctctcttgtctgcttccatgtaagatgtgcctttcaccttctgccatgactgtgaggcctccccagccacggggaactatgagtccattaaacttctttttcttgataagttacccagtcttgggtatgtctttatcagcagcgtgaaaacggactaatgcactttatatatttatgtattttttttacagtgagacagtattacttttgtaatttaaaaagagatgcaccttttacataaatctaatatttaaaaaatacgccaactgaccaacaggtgttttctggccccaggattatgaggctggcattctgtgttccctgagaaatgatttacagaaacgtttccctgagcccgagcaactctagggctgctgataaagtagttattggttgtccacttgatgcctggctctccttgtcacttctcaaatgtgagccacctcttaggaaactgaaaacttttccctacctttgttataacatgctgaattctctcattgggataatcaaatagatatatgtccacgtactcattcacccaacagatctttcctagtgggccactgtgggccaggtctttccccaagcactgggactagggagaccctatcctatccctacctctattgcttaaacccaggagttcaagaccagcctagttaacatggcaaaaaaaaacagcaccttgtactttaaaaacaacctaatatccagaagcaattgactgcagaataacttttcctttttttttgagatggggtttcactctgtcactcaggctggggtacaatggtgcgatctcagctcactgcagcctctgcctccagggctcaagcaatcctcccacctcagcctcctgactagctaggaccacaggtacatgccaccatacctggctacttttttgtattctggtagagatgggatgtccattttttgtagagagagtctatgttgcccaagctggtctcaaactcctaagctcaagagatctacccaccttggcctcccaaagtactgggattacaggagcgagccaccacacccagccttattttcttgagacagggtctcattctgtcacccaggctggaatgcaatggtgcaatcatggcttgctgcagccctgaccttccgagctcaagtgatcctcccacctcgcccttctgagtagctgggactgtaggcgtgcaccaccttgcctggctgatgtttttatttttactttttgtacagacgatgtctccctgtgttgcccaggctgctttcaaattcttgagctcaagggatcctccagccttggccttccaaagtgctaggattacaggcgtgagccaccacacctggaccctcattttcaataaaaaataaatttcaattatattcctagttaaaatcacagagctacagcatgaaggggcaatgggtatgttttcctaaaaataagcaatattcattatgaaaaaatgttcttatattttataaaaattgtggttttttttttctacctttttgttgtgtccgctgtggtgcaggaggggagcctggaaacccatcttgatgagaaatattttcatcgtcttcactgttcacctcatgtaacaatggcacctttttgttataaaagacaaaggagcaaaaaagtgagaaaggtaacctttatatacagcatgtcctcctaacaaattccaacatctttcaaaccttccccactgggagcttcctccatgggcacttcagctgctttcctcagtgacacacaaaaggcgtatatcaggtggggctggatgacacttccaggccctcaggaaaagcttagggggcaaaggcaacaccattaaagttatgctaaggccactgagagctccacatcccagccatgttgccagggcagcttcccttcctcatccctgccagggaccacccaatgccactccaccctggtactgacaccatgttactagtttccccccaccccttttttttgagacagggtctcctctgtcacccaagctggagcacagtggtgtgatcacagctcactgcagccttgacttcccacgtgcaagcgatcctctcacttcagcctctggagtagctgggaccacaggcgtgcaccaccacaaccaggtaattttttttttattttttgtagagacaaggtctccttatgttgcccaggttcgtctcaaactccagggcccatgcgatcctcctgcttcagcctcccaaaatgcagggattacagatgacagccactgcacccagcctgtgttaatcatttctatgtgggacaagcagtgctgacctcccctgggaggactctcattgaagcctcctatgttcaccaattatgtaagtccactgtaaatttcatttactgagggactcccctctactgactgagagtagctcctatataggtaaccattcatgttagctatataggagctgctgaaattttgtttcatcccaacatggcagggacacagagttgtcctttagagaggcccatgggccaggaatgggacctgccgctgatgaggaggagatatttccattggcaggagcctgggggtagggacagaggctgcctaagaggaagagaaagaacagtgaagcaggtctttttttttttctttttttaagacatggtctcactctgtcaccctggctggagtgcagtggcgcaatcatggcttgcagcagcctttacctcctgggctcaagcaatcctccacctcagcctcccagtagctaggactacaagcgtatgacaccaagcccagctaatttttaaattttttgtagagatggggtctcagtatgttgtccaggctggtcttgaacttctggcctcaagtgatcctcctgccttggcctcccaaagggctgtgattacaggcatgagccactgcactcgacctgaaccagttgttacatggtaaactgtgactggcgctgtctgggtgggctgccctttggctctcctgattcttcagtaaaatcttgcttttgtgatcagtttggcttagctgggctgcactgcaggcaatggaagggctgtccctggggctgacaaggaggtggtggcagggactagcaagacgcccatgagaaggggcatttcagagtaagagctaaggctgctacgtccacctgtctctgtggacatggttccaagatgacctggctcaagagaagcaaacaggtctcccaagatactcatcatttgaagaaagaaaaagtaaatggccccgtacttttttttttttttaatacagacaggatctcactatggtgtccaggccagtcttgaactcttgtcctcaaatgatcctcccacctccacctcccaaagtggtgggattataggtgtgagccaccacgcaaggccgacctcaagcttttttatctcccaggaacaaacttccttgttcaacctgtcaaaaatatattaagtgactcactattctcaaggaaatgtgaaataggtaagatgacttaaaaagcattaggggccaggtatggtggctcacatctataatcccagcactttgggaggctaaggcaggcggatcacctgaagtcgggagttcaagaccagcctgatcaacatggagaaaccttgtctctactaaaaatataaaattagccaggtgtggtggcacatgcctgtaatcccagctactcaggaggctgaggcaggagaattgcttgaacccaggaggcggaggttgcagtgagcagaaatcgtgccattgcactccagcctgtgcaataagagtgaaactctgcccccttcacccccacaaaaaaagcattaagaagatgctcaatatggacaatcgtttggcagtatctactggtactaaagctgatggtacatataccctatgaccatacacataccattcctcagtatatacccaccagaaatacacaaatatgtacatcaagggacacatcgccaaatgttcacagcagcactattcctaagagtcccaaactggaaccaattaagtctctgtcatcagtaaaatgaataactgagtggcacggttgtacagtaaaatatacagcaatgagaacaaacccgcccctgctatacacaataactgaagactcccaaactccaaataatgcatatcgtctaattaaatgcatgtaaattttcagaacaggcaaagctaatctcaggttatttttaaagattaaagctaatcttggcaatggttaactctgtgggaagtagtgactaagaagaagggtgatttctagggtacaagtaatttttttttaatctgagtggtggctactttttgaaaatgtatcgaaatgtgcacttatgatttactcacttcttgtgcatattttatatatcaataaataagtctactaaaaacataccttcataaagaatttgtgatactttatataaacatactttaaaaggcttggctgggcgcaatggctcacgccagtaatcccaacactttgggaggatcacctgaggtcaggagttcgagaccatcctggccaacatgatgaaacccaatctctactaaaaatacaaaaatttgctgggcatggtggcgggcacctgtagtcccagctacttgggaggctgaggcaggagaatcacttgaacccaggaggcggaggttgcagtgaaccaagattgcaccactacattccagcctgggcgacagagcaagactctgtctcaaaagaaataaacaacaacaaaaaattatatatatatatatatatatatacacacacacacacacacacacacacacacacgcacactactacagttgtttacttaaacttgtagtaaaagaataaaaacacaaacttccaggatgcactccaaatccaagaaaagatgagtttccaaggagggagtggggttaggggacaaggcaacatctaccctaatggtaacattttattatttattattttctacttttcacatgttaaaatttaaaaattttcctactacacatggctcctaaagccaccctaacagacttgcctaaaaaaacaaaatatctgtccttctagcaaggaaagagtctctgtaggtcactgtatctctttcttccaagggaaatattgtagtaagctttccctctagaacagtggagagatatgactctatgtgtaacatcggtacaaaataaccagccggcaagtgtgcgggtgaggagcagtgggactgattctgagccctgcagagctcgacaggagcacagttgtccatattgagctctgggcagtgtctgcctattccagagctgcttgctatgagaagcctaattctatgtgtgaaagtctgtatatgtgggaaaatgatggtgagttcatgaaacagccacataaggatccctcaaaataagctcctgaagaccatttaaaatgtattttagggccaggggcgttggcttatgcctgtaatcccaacactttgggagcccgaagcaagaggattgcttaagcccaggagttcaaggccagtctggctaacataacaagaccctggccctatagaaaaaaaaaaaaaaagccagttgtggtgccgcgtgcctaaagccccagctactcgggaggctgaggtgggaggatcacttgagcccaggaggaggtggctataatgagctaggatcgtgccactgcactccagcctggggacagtgagaccccatctcaatttaaaaaaaaaaaagtgttttaatatagtaggggctaattaatatacatataatcaataccggtgtagcttaatgctgctggtctatatgtacagacactatgaataacacattataatgatggtgaaaaaaagaaaaaggggctaggcacagtggctcacacctgtaatccaggtactttgaaaggctgaggcaggcggatcgcttgaggtcaggagttcaagaccagcctaggcaacatggagaaaccctgtctctacaaaaagcacaaaaaatagccaggcatggtggtgtgtgtctgtagtcccagctacttgggaggctgaggtgggaggatcacttgagtccaggaggttgaggctacagtgagctataatggtgccactgcactccagcctggaggacagagcaagactctgtctcaaaaaaaaaaaaaaaaaaaaagaaaagaaaaagaaaagaaatgaaaagaaagaaaaaaataaaggaaaaagggatatggtgctatattttgccattaaagaaatgtcattatctagtttccaaaaccctgggagcagtttaaaaatcgggattcgcagagcagctggcagtggagaagtatgtttccttgaatctctctgtgtgcagtgccctgatgtgtgacagggcaatgaagggaattcctcagcgagtcagtgggggtcagctaagataaatgcacacaggagttagaaacgggagcgctcacagtaaacactcaaagcacgtcagctcccattgagacacgcatgacgatcttccccgtcaggcatgaatttaaagaaaggctgcagtgtgcaaaatgataccataaaagtgataggaaatttagcttccaaggtcaaagaaaagaacgagattgctaagctgtgaatggaactccacattaacaatatgaagatgttaatctttgtttttgcaagataaaggaaagaagtttatgttttaatctaaccagatagaaatgaggctggacacgtttaaaaaaataagccccaaagcaaatgctatcaaatgcagaatagagagaagaaatccttagcaatgcactaatttaccaaaagttaacatcagggtgaatgtcaagaagaaaactgggaacatagaaaacacctgatttctgtgtggcacagcgtacaggtcatcactgtggcctcctctgtcctcccgggcactgacatcccccaattccttgccgctggatgacagctgagtttcaatgtcctcttcgtccccatagtccagtgtttcaaaggatggcaaagaagatcttcttcccatctcactctgccaatttggcctgtattagaatattcatggggaaaacaaacaaaaagtcacttaacacttgacactgataaatatctttttttttttttttttttgaggtagagtcttgctctgtcgcccaggctggagtgcagtggcacaatctcggctcactgcaagctccgcctcgtgggttcacgccattctcctgcctcagcctagtgagtagctgggactacaggtgcccaccaccgcgcctggctaatttttttttttgtatttttagtacagatggggtttcaccctgttagccacggtggtctcgatctcctgacctcgtgatccgcccgcctcggcctcccaaagtgctgggattacaggcgtgagccactgtgcccggccagtatcatgtattaaatgcactgcctccaagtccttaccataaatgtgggatactacaaagtacacagaagctaaaagattaaattttccaccgtcccatctctttgtacacttggcatatccttctagtttctgtttttagagttactgcatacatatacaatttgtcttgttatgaataagggttttttgtttttttgttttttttttgagacagggtctcactctgtctcccaggctggagtgaagtggtgcaatcatggttcactgtagcctcaatctctctgggctcaggtgatcctccagtctcagcctcccaatagctgggactaaccaagcccagctagtttttgtattttttgtagagacggggtttcaccatgttgtccaggctggtcttgaactccttggctcaagggatccgcctgcctcagcctcctaaagtgctaggattacaggcatgagccactgagcccagcctgttgttattattattgttattattattttgagacagagtctcactctgtcacccaggatggagtatagtagtgcaatcttggcttactgcaacctctgcctcccgggttcaagtgattctcctgcctcagcctcctgagtagctgggattacaggcactcgccaccacacctggctaatttttctatttttagtagagatggggtttcaccatgttggccaggatggtctcaaactcctgacctcaaatgatctgcacacctcggcctcccaaagtgctgggattacaggcctgagccaccatgcctggccccagcctgctattaataagtatttttattttttaaattgagacagggtctcattctgccacacaggctggaatgcagaggtgcaatcttggcttactgcagcatccacctccccagctcaagtgatcctcctacctcagcctcccgagtagctgggactagagatgcactccaccatacccagctaattttttgtttgtttgtttatttgtatttttagtagagaaggggtttcaccatgttgcccaggctggtctcaaactccagagctgaagagatccacccacctcaacctcccaaagtgttgggattacaggtatgatccactgtccccagcctattaatgagtttttatagtcaacattttaaaaggtaggaatccactagatataccagcttaaccagccattttccttgcttaggtggggtttttttccttcactttccattgttgtagataaccctgtaataaacatctgtgtgcagataacccctactgtatttaaggttactcacataaaacaaaccgccatagagtaaattctttttttctttatcttttttatttgagatggagtctcgctctgtcacccaggctggagtgtggtggcgcgatctcagtgcactgccacctccgcttcccgcgttcaagtgattctcctgcctcagcctcccgagtagctgggactacaggcgcctgccaccatgcctggctaatttttgtatttttagtagacatggggtttcaccacattggccaggctggtcttgaactcctgacctcaagtgatacgcccgcctcagcctcaaaaagtgctgaggttacaggcgtgagccactgtgtccggcccatacagtaaattcttgagtcaaatggtgtgaacattttgtgtctacatacatactgcacaaaatcatttctccaagctataaatacactggtaataattttctaaaacttgccaaaacaacttaaaacccactgtctaaatttgcatttgttactgagactgaatgtttttccatatacttgtgttcaggtcctttgtctgttttacttctggtatgtccattccaatttggttcttttttttttttttttttttttttgagatggagtctcgctctgtcccccaggctggagtgcagtggctccatcttggctcactgcaagctccacctcccgggttcacgccattctcctgcctcagcctcctgagtagctgggactacaggcgcccgccaccacgccagctaattttttgtatttttagtaaagacagggtttcaccatgttggccaggatggtctcgatctgctgacctcgtgatccgtccatctcggcctcccaaaatgctgggattacaggcgtgagccaccgcacccggcctgttttttctttttttatttttgtttttttttttgagacagggtctcactctgtcatccagggtggagtgaagtgacaagatcatactgcaactttgacctcctgggctcaagtgatcctcctgcctcagcctcccaagcagctgggactacaggtgagcaacaccatgccaggatgatttttgtatttttttgtagagatgggggtctcactttgttgcccaggctggtctcaaactcctgatctcaagcagtcctcccacctcagcctctcaaagtgctgggattacaggtgtgaaccaccacacttgacttccattccaatttgaaattactaaaattaatctactaaaattaaagtcctgactttgcttttactataaatgttttttctgttctattaatattattttgcttatataaatttcttaaacataaaagcgattaaaaaggtttttttactttctaaattcttggtgtaaaagcaaatagcagtcatatccctgaagaggtgtgataagactggatattggatttcacagtcttatttgtgtgtctatagagtatagtccttcattcattaggaatttattttagtgtatgacttaggcgaggctcaaagctgatttctaatactgctaatcaatatagcactgaatgctttccttcccctttgagctgtgggacaggctttattaaagattcagtatgcttgtagaaacactacgttcacctcagggcattcctgggcacctctgtatcactcaactagtcctacactgttcttgctactttatctatatgttttaaaatatgacagggctgggcacaatggctttttattgcatcaattgaggggtagctgttgggatgttcgtggttaaaatataatttctgggctctgactgggttgctttttagtctcttgtttttagggtttggcaaaggtaggtttacctaggttgatggaaaagtcagagatggggtggttgtggatttaatcggaaatagttcttgaaattgagtgtatgtgcgtgcatgagcatggctcacacctataatcccgcactttgggaggccaaggagagaggatctcttgaagctagaagttcaagtccagcctgggtaatatcaggaaaccctgtctctacaaaataaaaataaaaattagcctgggctgggcacagtggttcatgcctgtcatcccagcactttgggaggtcaaggtgggcagatggcttgaggccaggagtttgagaccagcctggccaacatggtgaaaccctgtctctactaaaaatacaaaaattagccaggtgtagtggcgcacaactgtagtcccagctactctggaggctgaggcaggagaattgctagaactgaagaggcaaaggttgcagtgagccgagatcatgccactgcactccaccctgagtgacagagcaagactctggctcaaaaataaataaataaatataaaaacaaataaataaattagccaagcacggtagcaagcatctgtggtaccagcttcttgggaggctaaggcaggagaatcacttgaccccaggaagaggaggttgcagtgagccatgattgtgccattgcactccagcctgtgcaacagaatgagatcctgtgtcaaaacaaaacaaaaaaatcccccccccgccaaaaaataaaatacaatggggatagtccagcactcctgtgggtcagaccatctcctctgatggtcttacgtgcttattttttccactgaattttagaacgatttactcgtttttagtttttactcagccaaagtataatgcttaccaggaaaaaaaaaaaggttaaattcaaatatctcaaaatggtagcaatatttttggccaaaacaaaaataaaaacaagccctagaaggaaatacattaagtatttatataatactaatagtaggaagggtcttactaaatttacaattattacagaaaatgtaaagaaaaaatggatagattttactaaatataaaatacagaatatttagtatatcaaaaaagcctacacaggccaggcatagtggctcacacttgtaatcccagcactttgggaggccaaggtgggcggatcaccagaggtcaggattacagaccggccaacatggcaaaatctcatctctactaaaaatacaaaaattagccgggagaggtggcacacgcctgtaatcccagctactcaggagactgaggcaggagaatcgcttgaatccaggaggcagaggttgcagtgagccaggattgcaccactgccctccagcctgggcaacagagtgagactctgtctcaaaaaagtcaacccaacacaaaggtgaatatacgtgacaattaaaaaggcaaatgtggccaggcatggtggctcacgtttgtaatcccagcactttgggaggccgaggcgggtggatcacctgaggtcgggagttcaagaccagcctgaccaacatggagaaaccccgtctctactaaaaatacaaaaattagccaggtgtggtggcgtgtgcctgtagtctcagctactcaggaggctgaggcaggagaatggcttgaacccaggaggcggtggttgcagtgagccaagattgtgccattgtgctctagtctgggcaacaagagtgaaattctgtctcaaaacaaaacaaaacaaaacaaacaaaacaaaaaaaaaaaaaacagacaaatgtgatcgtggatccctactcccatccctgccccatgcacccttagagacctccagtgtcttcccaccactccaaaggcagacaccaaccctctaaacaggacaccaaaggcacccccagcctggtccctgcccactcctccagccccatctcgcatcccaaacatcctctttccactgccacctgtgtcacactccctcgtttctgtctggaaagctcatcccagccccacaaagatcatgcctagcccttgagctgttcctagatgattcctgtacatcctaagctctccccttgaccctttcttcctcaggaggaaaccttcctgaccccctagccctgtgtcagctcaaacccaggacaagcaacaaaggaaaagatgatgaagaaaaaaggctaaactgcagctgccaagaagatcaaattaatgtgaatgtccagagatacacgtgagaggtaaggagggaccactctcactgttcaggttgctgcacaaagaaacttactaagggctggaagcagcgctgaattcattagctctgtgccgctgtgaaaatggccaggacccatacaagtcaaaatctaacaagatccactatggaggaaatccagatcgcagagcaattaggttgctggacagtgtccatttgacattggtgatgaaaacccagtgactaagactctagtcataaatacatgcatgagcacccacgcacccacacaggtacacatgcacacacatgtacgcatgcacacatacacgtagagaccaggctgagcctgcccctcttccactctcagaggaagcagaggcggcgatctggtacctaccgaggcctcagctgtgaggtggtggcatagggctcgatgaagctgtcctgttcaacactgctcacatcactctcagaccgggacctctggcgaggctgaggaatagcaaccgtccgcccagtcaatgttgtcgccagaatggctgctgccagagcagatctgcggacaaaaacatcccatggagacagtgagacatgaacattccaggtgaatgctgaacaaggtacataaactcatcaaggcttaccttctgctggacagtgtcgactgagcatttactctgcacccatcatctaccgcaggccatcagacaatctcatttgattctcacacaactgtatgactacatattattgtcatcccattttccatagaaattaaatgacttgtaaagattacctagccaataggaggtagaacagggcctctaatccaggcagacacaaaagcctacattcaagtagttttcttattagaatggaagatcagaatggaaaaagaaaatgagatatagaaagactaaaagatttaaaaggggactttaaaaatacttgtgaattactcaggaatattttacaggaaagttagagtaaacagatttaccctcctgcctaaaaaagtaaaacaaggccaggcgcggtggctcatgcttataatcccagcactttgggaggccgaggtgggtggatcacgaggtcaggagatcgagaccagcctggctaacacggtgaaacctcatctctactaaaaatacaaaaaaattagccaggtgtggtggcgcgcacctgtaatcccagctactcaggagactgaggcaggagaatcggttgaacccgggaggtggaggttactatgagcctacattgcactactgcactccaacctgggcaacagagcaagtctccatctcaaaaaaaaaaatagtaaaacaaaacaaaagaccaccgtcccagcttgctgcctaggaaaatttccaggtcacagcacagggaggaggaatgggtggagccaggcagactccctgagttgcagagatggagctgagagaatgtgtaggatagagtgccggaaaggagagaactgcacagagagaacgaggagatctgcagaaggtcccctagtttcagcgggatacagtgcagcacacaagtgtgaggaaattaccagacagtggaggaagaaccattcaccaggatcagaggagcagtgccaggtgcttacatacagcccaagacggcagctgctcccaccaggaagactggagaaacctatcattcacaagatgccgggtgcagcactcagaaaggtctggcctgggtactggggaataattagccctggctgggcactgctccacaccccacctaacaaatcatataagaaagacccggccaggcacagtggctcacatctgtaatcccagcactttgggaggctgaggagggcggatcatgaggtcaagagatggagaccatcctggccaacatggtgaaaccctgtctctaccaaaaatacaaaaaaaaaaaaaaattaggtgggcgtggtggcgggtatctgtagtcccagctacttgggaggctgaggcaggagaatggcgtgaacctgggaggtggagcttgcagtgagccgagatcgcgccactgccctccagcctgggcgacagagcgagactccatctcaaaaaaaaaaaaaaaaaaaagagcatcaatcagatgtgggataaaaaccaccatttttcatattttggttttggggcttttttttgagacgatctcactctgttgcccaggctggagtacagtggcgcaatcacagctcagtatagcctcaacctcctgggctcaagtgatcctcccacctcagtatcttgaatagctgggactataggcacacgccaccacacctggctaatttttatattttttgtagagatggggtctcaatatgttctccaggctggtctggaactcctgggctcaagtaatcctcctgcctcagtctcccaaaatgttgggattacagccatgagccaccacgcccagctgctgttttgttttaaattactacattttggtgcaattgtcacacagcaataaataactaatagccttaccatcaaatggtgctggaaaaatcaaatttccatatgcaaaaaaaaaaaaaaatcatggatctataccttacacactgatatggtttggctctgtgccattacccaaatctcctctcaaattgtaatccccatgtgtcgaaggaggaaagtgattggattatgggggtggtttcccccatcctgttcttgtgatagtgagctctcacaagagcagatggttttacaaatggtagtttcttctgagctctcacatgctcgctctctctcatctgccgccatgtaagacatgcctgcttccccttctgccatgattgttggtttcctgaggattccccagccatgcagaactgtgagtcaattaaatctcctttgcttataaattaccacatctgaggtagtatctttacagcagtgtgagaacggactaatacacgcaccatctacaaacactaactctaaatggattacagacctaactgtaaagccgaaaaccataacacttctagaagaaaatataagagaaaacctttgtgaccttaggttaggtaaatatttcttcaatatgagatactgaaagcatgatccataaaagaaaaaattgtaagctggacttcataaaaattaataacttctgctctttgaaaggcactgtttaagagaatgaaaagacaagccatagatagagagaaaagacttgcaaatcacatatttgataaaagacttgtattgatactatataatgaaccctcaggatgcaataatggaaaacaagccagggctgtgatgtctccaggaaacccacagtcttcacccaggtctctgcttacgtctcctggatgaaaaatgtcattgcctccaactgaacatgatcctgagtccaacggccttcccaagatggttcttagatctgcaacaggacttgtgaccaacaaggaatgcccaatttttataaatgggcaaaagatgtgaacagatgctttactaaaaaagatataaagatgacaaataagcacatgaaaaaaatgctcaataccattagccattagagaaatgcaaaataagaccaggcgcggtagctcacgcctgtaatcccagcactttgggaggccgaggcgggtggatcacttaaggtcaggagtttgagatcagcctggccaacatggcaaaaccacatctctactaaaaatacaaaaattagccgggtgtggtggtgcatgcctgtaatcccagctacttaggaggctgaagcatgagaatcgcttgaatccaggaggcggaggttgaagtgagctgaaatcgttccactgcactccagcctgggtgacagaatgagactctgatcaaaaataacagactccatctcaaaaacaaaaaaacaaaaataaccacaatgaaatactagtacacgctcatgaaatgtccaaaattttaaaaactgaccaagacaaccccttgtgctcttttattctaaactgggcctatgagaatggattccacaaaggagggcaataagaagggttgttctgtcgtcaacaaggttgtgaccagaaagcacactatcagcactcatgagcacacctatggagtgtgctttaagacactgcccctggcatacacaaagagatctggaaattttccatgaaagagctaggaactcgagatgtgtgcattgatgccgggctcaacaaagctgtctcagacaaaggagtaaggaatatccctcaccctatctgtgtaccactgtccagaaagcgtaatgaagatgaagattgatcaaacaagctctgtacattggttagctatgcaactgtcaccactttcaaaaacctacagtcaatgtggatgaaaactaaccactgactgtccaagttataaaagaccacacacacacacacacacacacacacgcactcacacgcatgcacatgaacacacacacacacacacacacacacacacacacacacactctgaccaaaccaagtgttggtgagaatatgaagcaactggactcatatactgttggtgggaacataaatgggacaatgaccttggaaaatagtttgacagttccttaataaattaaatacctgcctagtataaggcccagttatagatatttacccgagaaatgaaagtatgtatccaaacatttgtgtatacatttttttttttttgagatataagtctcgctttgttgcccaggctagagtacagtggtgcgatctgggctcactgcaacctctgcctccaggttcaggcgattctcgtgcctcagcctccccagtagctgggactacaggagtgcaccaccacacccagctaatttttgtatttttagtggagataggttttcaccgtgttgaccaggctggtctcaaactactaagctcaggtgatctgcctgccttagcctcccaaattgctgggattataggcatgagccaccacactcagccagtgtgtaaatgtttacagcagcctttttctagtaaccaaaaattagaaacaaactaaatatccatcaacaggagaatggataaacaaactgtggcatattcatataatgaaatactactcagtaaggaaaaggatgaattattgactttcggaacacgcgttaatcagaataatcatgctgagtgaaggaaggcagtgtattttatgtaactccacttatataaaattctagaaaatacaagctaatccatagtgtgagaaaggagatgagaggttgcctggggatgaacaggagcatgaaaggtggcagagaggggcagggggaaggaattacaaaggagcatgaggacccttgtcagaatgatagatatatttattatctttttttctttttcaggagctaccctattaattatctttttaaaataaacttttttagaggcagggcctcactcacaacagcctcactgttgctcaggctgcagtgcagtgacatgatcatagctcaccgcagccttttcctcttgggctcaagtgatcttccagccttagcctcccgagtatctgggattgcagacatgcaccatcatgctcagataatttattttcttttgatttttgctatagataaggatttgctatgttgcccaggctgatcttaaactcctgggcacaagcaattctcctgcctcagcctcccaggatcagtttaccctaggagttcaagaccaacttgggcaacatagtgagacctccatctctgcagaaaatttaaaaaattagccaggcatggtggtgtgtacctgtagtcccagctactcaggacgctgagacaggaggatcgcttgatgctagggggttgaggctgcagtgagtcacgttcgcaccaatgcactccagcctgggcaacagaatgagaccatatctcgaaaaaactttttgttttggccaggcacagtggctcacgtctgtaatcccaggcactttgggaggcagaggcaggtggattgcttgagcccaggatttcagcctgggaaacatggcaaaaccctatctctataaaaaatagaaaaattagttgggcatggtggtacatgcctgtagtcccagctacccggcgggctgagatgggagaactgattgagcctgggaggtggaggctgcagtgagccatgattgcaccactgcactccagcctgggcaacagagcaagatcttgccttgaaaaaaaaattaataattaaaaaaaaaaaagaaaatgggctgggtgcggaggttgatgcctgtaatcccagcactttcagaggccaaggcaggcggattaagaaagaggtcaggagtttgagaccagtctggccaacatggtgaagccccatctctactaaaaatacaaaaattagctaggcgtggtggcatgtgcctgtaatcccagctactccggaggctgaggcaggagaattgcttgaacctgggaggtggaggctgcagtgagccaagattgcgccactgcactccagcctgggcaacagaacaagactccgtttcgaaggaaaaaaaaaagaaagaaaattatgtgtataattcaaaattccctgttaacctgaatacttgggctttaatgctttacatttttttttaaatactcattgcattcaatcatgaaatgtgagaagttcatgcacctgaaaaggagagacctcaagtcagtccattatcctcagagacaccatattaattgcatcattatggaatcgtggtaaacattttgaaggacatgattctaaccaccctacttatacttttctgggcagtttgagcagttccaggatccagtacttggaggctgagcacaggggtgacctcagtgcctgctcatctgatactcaccttggtctctctggagatgggttggggctgcggggaggaggtgtgcgtggcacagctgccttcggagcaacgctggctgcaggtaaaaggccatggatgatgtgtttctgcacaaatgaaatccaacagaagtcactgggttgggtcactggatcacctgagtcttgtcaccactctccctgggcctgcaaggggacacctgcactggccacccatggatccaaacccatcagaagcccactcctcccctgccatccccagtccccatcaggccagacaagtgcacacagccaaggagcatcatgatagctgctcattgtgtggccctcttgtccttccctcctcagagcttccctggctgtccccaagagtcaccctctagctcttccatgtgtcccacagcactccccccagtgatgtctcatgtggctccccctgcagagcagggcgacttcctgagaagcaagtgatatccttattgtttttcgctttgttttgtttttgagatggggtcttgctctgttgcccagagtggagtgcagtggtacgatcatagctcaccgcagcctcaaactcccgcttcagccacacgagtagacgggactacagatgttcaccaccatgcctaggtaatttttgtatttttttgtagagacaggatctcactacattgcccagactggtctcgaacttctagcttcaagtgatcctcccacctcagcttcccaaagtgttgggattataggtgcgagtgctgcacctggcccactctcttatctttatcaatcctggaactctagcattgagcacattgcctcacacctcataggggcttaatataagcttttaggtggcttatctccaagacgagagtaatgaaaactagctcctatacacaatgaaagtcagagagctccgctttaggtaactgtaactgggagtctctgagacgtttctgggtctagtccaatcattttcttggcacgagccattcattcacacctactagaggcaaaacaccatgacagcaatgaagaaaccttgtcttcatccccaaagtggtgagaagggaggaaaaacacccaaataattattacagaacatagaattatggaatgagccgggagaaaggctctcactaaaaatgaaaaaaaaaaaaaagagcatcaatgagatgtgggataaaaacactattgttttctatttgaagccagtaattagcacaaagtgctggggtgggcagggagggaagattcctccaggtctggggccagcctgggaatttcaaatgctttccttcgagaaaatcacacaggcgtttagactgggctttcagagatgcccactggtcccacatttggaaatgtgacggaacagcattctaggaagagggaacggcatgaacaaaggaatggagcaagacattggttgcagtgctcggaaatcataagcacgattctccgttttgctagactagaggcatcttcgagggtggggcttgggggcatggtggggacaattcccatgggaagggcttccagagcagatggaggaaatcccaaggcctagtgaggagcacccactgacagtggccccaggaatgttaggtagtggtcagcacgagacacaaggctgggaagggtggcacagagtgggggcatctttcaggagtgagggatgggcacaccttccagtcatctcctacagcccccaccaccgacttgcacagccacccacaggagcagaagctccaagcagtctctacccaatacccccactctgtttacctctgtgtggcacctgccaccctgtatttgtcaagtgattccacagtttccatgtttccaccctgcccccctccaccacctgctacacgacaagaaatggtttttgtttgtttgcttgttttggagacagtcttgtctgtcacccaggctggagtgcggtggcacgatcttggctcactgcaacctccacctcctgggttcaagctattctcatgcctcagcctcccaagtagctaggaccacagtcatgtgccaacatgcctagctaatttttgtattttggtagagatggggttttaccatgttggccagggtggtctcaaactcctgacctcaggcaatccgcctgccttggcctcccaaaatactgggattacatgtgtgaaccactgcacctggccagaaaaggttttcttaacctttgaatcccaagggctggcgtccagcaggtcctccaaaaaggctgcataagattttttttttttaaagagtgaatcccccctcataccatcacaatcattcctaactatggtcccctcatcaatcctgtctctactgggcataaaaaccctcatgggcagcaccactctctcaacggcaggcaaatgtccagcatggcttatcaggctgatataggttggttcctaccaagtgttatgggatttttggggtgtcgatttttctggccggaacctctgtggccacagtgcctttgcctgagttcttgtcctgcatccaggaagaatgaggtacacagacaagtgaagggtgaagaggagttttatttagtgttagaagagctcagaggagtgggtagctcctctctggagacagattgtcccatgagctcaaccattcagctctcaacagagaggaggccctggagagagtggctcctctccgcaggcaagtcattccaatgtctctgcaggtctctgaagctcgcagcagagtgtagctcctctctgctggcaggtggtctctgtagctttcagcggagaaggtactcctctctgtagctggtcaccccaccgtctccagctatcagcagagagggtactgctctctgcagctggtcatcctgtcccctcgtctctaccatcttcatcctctggctattctctgcgctgctctggctgagcccagggtttttatggacctcagcggggaagaagtgtgtgctgattgggccattggcaggcccagaaaaggctccacgagtttccactctggtcagagggactggcagcccagcccccagaattcaggccctccctggcctgagggtggggccttactggggaccccacccccttcctcctgctgccattcatggctgcaggtcttggctccgactcccctccaagatcagagcagttgctggagtggagagaggccaggcagtggaagcagacacccctgagcctgcagggatggagggtgaagggggctgtccttcctgggatggccgatggtgcaggctacagagatgccctcgtcctgtgcctgggggggcagccacagctgcacctgggagctcccaccccgccaacttggaagaggcagggctcccacttgtccctggctcctgcctgcgcggctgcagctgcatctggaagggcaaattctgcctgttcccggctcccccaggagcagagaggctcggatccacagctgcagtttgggtggctgtagccctgcccaagagggtggggctcctgcctgctccatagagcagaaggcctgggtctgcagcagcggtttgcggctccagtcccaactcatgagggacggggcttccaccggctccatgaagtgtgcagccctagccacacagcgtgatggcagcagccactgccatcacaaggacccaaattcatttcttgcttcccctcctcttcctgcgcagagtccctgtgcttcagcactcagcgtgggcttccatttcccaaacagcaaataattcattcttttttaggccttggtatttgctgtcttctgcacccagaattctttccttactccctgccaggcccaggccaactctccaggctgacgtcactgcccttctggtacacacatcaacagcagttcttgttttaccattgtgtacagaattatttatgggcttgtctatcctacagaccgtgtggccataagctgtcagttgtgggtatcagcacacagcagggactcattaatgtttggggctttaaataaaaactcaagccagatgcagtggctcacacctgtaatcccaacactctggaggccaaggtgagaggattgcttgagccaaggtttaagaccagcctgggcagcatacccagaccccatctctaccaaaaaaaaaaaattatgtttttttgaggcagagtctagctttgtcgcccaggctggagtgcagtggcacaatcttggctcactgcaacctctgcctctcgggtttaagcgattatcccacctcaacctcccgtgtagctgggattacaggtgcccaccaccacgcccgctaatttttgtatttttagtagagatgggttttcaccatgttggccaggctaatcttgaactcctgacctcaaatgatccgcctgcctcagcctcccaaagtgctggattacaggtgagagccacctcacgtggcctctacaaaataatttttaaaattagccaggcattgagacttggcagagtgtgaggcaaaaaataaaataaataaaaaatacctaggtgtggtggtgcacacctgtagtcccagctactcaggagcctgaggcaggaggatcacttgaacccaagaggttgaagccacagtgagctatgatcatgccactgtactccagcctgggcatcaggacaagaccctgtctctaaaactaaattaaataataaataaatataagaatccccttggctgctacgtggagaatggacctaggggaagggcgagagtggaagcagagaaaccagtgaggatctgccgcagcagtccagacagatgctggaggccggggtgtgggtggagatgggaacagctggcagatgtatgtagtgggtatatcggatgggacttgctgatggggtgtacatggtgggtggaggagggaaaaatgaagaatggctatatccagcagtgcagcaggtgtacgtcgtccaggagttaactccgggcacggggacgaatgctacaggggaggcagggtgctcctgtccaactgtggccgaccctggggcagaagattgttaacgccgggcacagtggctcacgcctgtgataccaacactttaggaggctaaggagctcaagaccaccataggaacatagcaagatccctgtttccacaaaaatattgaacaattagccgggagtagtggcgcgcgcctgtagtctcagctcctcgggaggctggggtgggaagatcgcttgagcccaggagttcgaggatgcagtgagctatgatcgcaccactgcactctagcctgggcgacagagcgagaccctgtttcttaaaaaaaaaaaaaaaagtttagaacacgaaaaatcaaggcttcctcaactgaaaaccactttctcttgtgccgcccccttgactggatctcaggccaaaccccaacccgccccaacactttacccctaattcccggccccacagagccccacgcgcggcgggcgagcatctacttacgaaatgactcctgcggcctctccgaaatcccaggagcatccttgcagcgcgaggagaatggaccggggcctggactcatcagcagatctatccacagccagggaccactccctaaagcccgccgcaggcccagccctcacgctttctcttcgcaatggactttgcagcaaccacgtcggccattggctcagctcggccctcgaccaatcagagctaaggttacttccacaccggtcgttcttggcaaccagtgggtaccgttcaaatccccgccagggcggaaacgtccgcccttatccgttctcttattggtcaggttagacgtccatttctgacgccacagcctatccggcgctgcgggaggcggagggcgggctggatgaaggactgggcgagcaccgagggcgtgaacccggaaggtggcgcggccaccagtaacatgatctctagactgggacggtggggttcctgccggctgtattcgggccttggactggactgagaagctacggtgcggatccagctggggtatcaggggctaggcacgtgatgaaaatgaaggacgcggacaccaggacaggaatctcctggttcttagagaatttatttcgccacaaataattggcaaacgggatctcgctgtattgctcaggctggtctcgaactcctgggcacaagcgatcctcacgcctcagccttgcccaatgttgggattacagacgtgagctaccatgcccagcccaggattcttttaaaacttaaatctgatcgtgcctctggccttattggaatccaatgccattaccacctccaccaccacacatcccgtctccagccaccctggccttcattcaggcctttgtgttttctttttcttttcttttttttttttttttttgagacgagtcttgctctgtcgcccaggctggagtgcagtggcgcgatctcggctcactgcaacctccgccttccggattcaagcaattctctgcctcagcctcccaagtggctgggattacaggtgcccaccaccaagcccggctaatttttttgtatttttagtagagacgcggtttcactatcttggccaggctggtcttgaactcctgaccttgtgatccacccgcctcgctcggcctcccaaagtgctgggattacaggtgtgagccaccgcgcccagcctgtgttttcttattagtaattataaagggaatcttatttgacagttctttgacaaataattcagtttgcagaggggatcctgccccagaggccctggcttggagtggaatgcagggccgtgtgcaggagagcctgctcaagtgccgcctggcttttccctccttaggtggagaccatccatggaaaagaacccccctgatgatacgggccccgtgcacgtgcctttggggcatattgtggccaatgagaaatggcgcgggtcacagctggcgcaggagatgcaaggtcggtggcctgccctctgccagccctttcctcccctgacatattaaaaaaaaaaaatctgcctattattgccatcttttcatccaaagcttatggaactcattttcttctctgtattttaagggaaaattaagctcattttcgaggatggcttgacaccagacttttatctgtcgaacagatgctgcattctttatgtcaccgaagctgatttggtggcaggaaatggctacagaaagaggcttgttcgggttagaaatgtaagtattaggctgggtgctgtggctcacgccagtaatcccagcactttgggaggccaaggcgggtggatcacctgaggtcagtagttggagaccagcctggccaacatggtgaaaccctgtctctgctaaaaatacaaaaattagctgagtatggtggcgcacgcctgtaatcccagctactagggaggctgagacgggagaattgcttgagcctgggaggcagaggctgtagtgagccgagatcacgccactgcactccagcctgggcgacagagtgagattccaactcaaaaaacaaaaaacaaaaacaaaaaagaaatgtaagcattggattaaagaaactcgaacattgatttgtctcaccccacccttccctccatcccttggtatcatttatttaaaatcattggccaggtcaggcacgaagtgatagcattcttaacctgaaaagcaatttggttgcaaaatgacttactgtcttttttcctttcaagtccaataatcttaaaggaattgtagtcgttgaaaaaacccggatgagtgaacaatacttcccagccctacagaagtttactgtgctggaccttggaatggtgctgcttccagtggccagccagatggaagcatcctgcctcgtcatccagttggtgagtaccgattcctacaccttcgtggtagtcctgtcctcatggacactcagctgctctccagaagcaaccatcaatccaatctatgtcattctctgacttggtttataaaatctcttcgaggaatttaaatgcggaagctgcctctgcagccagctcagcttgtcacacactccaggcaagtgtatcacaaagtatacaagttggagacctgattttagattctcagggtgtgatggctccatcagtcattatcctgccctttcgctggtgaaaacgtcaacctagaggccaggcgtgatggctcatgcttgtaatcccagcactttgggaggcggaggcgggaggatcacttgaggccagcagttcgagaccagcctggccaacatggcaaaaccctgtctctactaaaaatacaaaaattagctgggcgtggtggtgggtgcatgtaatcccagctactccggaggctgaggcaggagaatcacctgaactgaggaggtggaggttgcagtgagtggagatgctccattgcactccagcctgagcaacaggagcgaaactttgtctcaaaaaaagaaagaaagaaagaaaatgttaactagaagctgctttgtctcatcccgtatttttgttaagcatcagcaccttgtgcaagttttttttttttcccttttttttgaggcggagtctcgctctgtcctacaggccagagtgcagtggtacaatcttggctcactgccatctccacctcccgggttcaagccattcttctgcctcagcctcccgagtagctgggactacaggcacgcaccaccacacccggctaatttttgtatttttagtagacagggtttcaccatattggccaggctggtctcaaactcctgacctcatgatccgcccaccttggcctcccaaagtgctgggattacaggtgtgagccaccatgcctgggcagtttttttttttttttagatagggtcttgctctgtcattccagctggagtgcagtggtgcaatcttggcttactgcaacctttgcctcctgggttcaagcgattctcctgcctcagcctccctagtacctgggattacaggcacccaccaccatgcccggctaatttttgtatttttagtagagataagagtttcaccatgttggccaggctagtctcaaactcctgacctcaggtgatctgcctgcctcagcctcccaaagttctgggccaccgcaccaaccaacacttttttttttttttttgagatggagtttcgctcttgttgctcaggttggagtgcaatgatgcagtctcggctcactgcaacctcctcctcctgagttcaagtgattctcctgcctcagcctcccgagtagctggaattacaggtgcccgccaccacgcccagctaatttgtattcttagtaaagacggggtttctccatgttggtcaggctggtctcgaactcccgacctcaggtgttgtgcccgcctcagcctcccaaagtgctgggattacagtcgtgagccatcgcgcccggccgccaacacttatttttaaaatcagtttagtagcttacgcctctgatcccagcatggggaacatcaattgtgtgtgtgtgttgtttgtttttttcacttttgttttctttgttatgtgtgtgttgtttttaaatcaccccctctgatgtggagctagagttgagagccacattgaagatgcaagcagccatgaatggttcacagatccctctctactatatcccttgcgtcaccgttcctaactttccttgatataacactgttgtctgccttagtataaccaccactaactagaccaggtttctcctttgaggcaggcttcctgcagctcctgcgtgaagtaggcctagtttaggtgtagccatcatttaatcctgcacaactgaaatgtttcttaatggaccaacagaaagtgtttgaattcatctgtgtgtttttctaaacattctgaaaacgcacatttttgtaaattaatgtcttaactcctttgtgtggttcacctttcaataattttactgatgtctgagaaattatattcatgatacatgaaaacatttgttcccttaagtcaagctgagccaaatggaaaaacgcaatttctacaaaacatattttaagaaaacggccagtcctccagagggcgctcacgtgctgttgctttcattgtggttcaggttcaagagcaaaccaaagagcccagtaagaaccctcttctcgggaagaaacgggccctgctgctgtctgagccttcgctccttcgaaccgtgcagcagatcccaggagttggaaaagttaaagctccccttctcctccagaagtttccaagcatccagcaactgagtaatgcttccattggggaactggagcaggtggtcggacaagcagtggcacagcagatccatgccttcttcacgcagcccaggtgagggctggcctcagggccacggcatcttctcctgagaccacaaacaccaggatcttgttttcagctttaaaaaccaagagaatgggccgggtgcactggctcacgcctctaatctcagcactttgggaggccgaagacagcggatcatctgaggtcaggagttcaagaccagcctggccaacatggagaaacccctaaaaataggaacaattagccaggcatggtgacaggtgcctgtaatcccagctacttgggaggccgaggcatgagaatcacttgaacccgggaggcggaggttgcagtgagctgagatcgtgccactgcactccagcctgggcaccagagcgagactccgtctcaaagaaaacaacaaaaaaaaaaaaaaaagaaaaaggattttctccagcagcaaccagtgaaagatgaggcgaggcttgaatggagcccgtgggtcgtcctgccttagcgtctgagttcagcttgtgaagttagtgggccgcagagggcactgccttcattctgctaagacgaaaagggctggtgggatcttcgcaagagagtcagggactcacactcagcaaaaagcattagggccgattttaatgtgcgaccttgacctgcatctgtcatggaaagtgccttctaaaaagcttcagtggtggatgtgaccatctgaaggaaacaaatgtacaaggaagcactgtgtatcctaagccctgggttcccagagtttcacctgctgttcatcaggtctggccttcatatacccgtactgcgagggctgtttccaatgtaaataaataactgcgcaacagttccttcctcctttcctttgttcctccctccccccggcctttttttttggcagatgtacagtttgtttataatcactgcatatgtcttctgcacacagaaagtatgaagtctgaagttcccacttaaagttgaaaactcaacggccgggcatagtggctcacacctgtaatcccagcactttgggaggccaaggggggtgaatcacaaggtcaggagatccagaccatcctggccgacatggtgaagccctgtctctactaaaaatacaaaaattagctgggtgtggtggcacacacctgtaatcccaactactcaggagactgaggcacgagaatcgcttgaacccaggaggtggaggttgcaatgggccgagattgcaccactgcactccagcctggatgacagagtgagactccatctcaaaaaaaaaaaaaaaaaatttaaagttgaaaactcaacatgcatgaggcagaacaggctgtgtttgtatatgaaaggcccaacaatggaaggatacaagaaaatgatggcagcagctgcatctagtgagggaagcaggggctggggatcaaaaggtacaaattgcccattcaaaaaatagacacaggccaggcacagtggctcacacctgtagtcccagcactttgggaggctgaggtgggaggattgcttgagtccaggatttcgagatcagcctgggcaacatggcaagaccccatctctacaaaaaaatcaaaaaaattagccaggcatggtggctcatgcctgtagtcccagctactcaggagggtgaggtgggaggattgcttgagcccggaaggttgaggctgccatgagccacaattgcgccactgtcctcctgcctgggtgacaaagcgagaccctgtcttgaaaaaaagacaaaaacaaaaaataagcacaaagataccatctgtcttagaaaatactaagataacttgacagctttttaagttctgctttgtgaaatgttagtaactaaaaaaatcagaacattagaaactgtgtgcattggggagaaacaatttgaaagaggagggaatgaaaatgaaataaaagtaaaaagaaatattaactcgggtaaatgaatatgtttatttaaatatgtatacaagcatggccctaggagcagcagatacactttcccaaaggtggttgcttcctttaagatattgcacaatagaaaataaactcttgtcaatccttaaaattagtcttcaatgctatgtattttagctatgtaacttgtactgtgtcaacagtgaaccttattagattcacggtgtcatcgaacttatagcaagataaaaatcaatcagtaggaatgtcattttaaaaagtaaaatagtgggacggttgtggtggctcatgcctgtaatcccagcactttgggaggctgaggtgggtggatcatttgaggtcaggatttcgaaacccgcctggccaacatggtgaaacctcacctcaactaaaaatacaaaaatcagccaggcatgctggagggcaccttgtagtcccagctatttgggaggctgaggtaggagaatcgcttgatcccagggggcggaggttgcactgagctgagatcacaccactgcactccagcctgggcaacacagcaagacgctatctcaaacaaaaaaaggaagtcaaatagagctttaaacctgaatcatttacatctttactttataaaatgtaaaactacttttttacccaagacttaaaatatagaattatgtaacttctactttaaacaaaatgaaaaatgttttgagtatcaaacagtatattatctaccttgtagacagcatcttcatctaacactgccactgtgttagtaattcttaaatgacatcaaactagaagaaaagctgctcctacattgtttttatttaataagacaaatttggcactagactttttctagaaatagcattcatagtctatcgatataatagtaacatcttgttttaggttaatgaattcctattaggaagcagcactttgggacagtttttagtgacactaatttaattctatcattacagtcctctgacctgccttaattccaggatcatctgaattctaggttaaggaatgattattagccaaacctggaaacaactacaaattgtactgatataggtaaccccaatttaatagtgactaaaagtcataattgtcaccattaaaaatagccatatttcatatcttcaacactattctatttacaatactttatataataaataacttacagcagtatagtaacacacctcaaaaaagttcttttttcactaattcctagaggtttcttggttactttccttcataaaaacacatcaaatgtgagtttacactatgagaaaaacaggatttgagaacagatagatagatattttccattatggcacaaacgtttaaggccgagtcagcaccggaaatgttcagggcctgaacatgtttgtttcctcacattagtaccaagaactgtctgagttgagaaggctgaaaggggagggcagcttcttcttgacctgaggccgtgcagccccgaccgatgggaggcacaaggtgctggctgacttctgtctgttcttgttggtgccccaactcaggaaggaaagcttcttggagattttcttggttttatcagttttgtcgtcatcatcaatggctaagcagatcatggagtacgttttctgcattcccacggagtatgtggcactcttattatgctgcacatagaaaagtaagaaaaagggcgtcaggcatcatcaagatagatgataaaaactacgaagtttggccaggcgcggtggctcacacctgtaatcccaacagtttgggaggccgaggaaggcggatcacttgaggtcaggagttcaagaccagcctggccaacatggtgaaaccccatctctactaaaatacaaaaattaaccaggtgtggtggtggatgtctgtagtcccagctgcttggagcctgggcacaagaatcacttgaacccaggaggtggaggttgcagtgagctgagatcacaccactgcactccaacctgggtgacagagcaggattctgtctccaaaaaataaattgaacagacataattcggaaactcaggtgaccaatgcttatatagaattaggttcttaaaacaaggacaaactttttttcttttttgagacagggtcttgctatgttgcccaggctggtcttaaactcctgggctcaagcgatcttcctgccttggcctcctgagtagctggggctctaggtgtgcaccaccaggtccaacaaggataattttttgtttgttttttgtttttgttttttaagacagagtctcactctgtcgcccaggctggagtgtagtggtacgatctcggctcactgtaagctccgcctcccgggttcacgccattctcctgcctcagcctctctgagtagctgggactacagacacccgccaccacacctggctaattttttgtatttttagtagagacggggtttcaccccttctcgatctcctgacctcgtgatccgcccgtcttggcctcccaaagtgctggaattataagcgtgagccaccacgcccggcccaacaaggataatttttaaggaatgtactcaatagtaacaatttaagcttaggagccacaactcatattttaaggttcttcttctatttgagaaagtaataatactcatggtcacgaatatgaaagtacagggtggggcgcggtggctcacaactacagtcccagctacctgggaggcttagaggggaagattgcttgagcccaggaggttgaggctatagtgagctgtgattgtgccactgcactccagcctgggcgacagagtgagacctctgtctcaaaataaaaaaaaagggggggggcggggggaagggaagaggggaaaggaagggaagaggggaaggaaagggaagaggagaagggaatggaagagggcaagggaagggaaaaaaaaaaaaagagtatgcagtgagcaataggtctccctgtcacctgggcttctaaggccctccatgttatacttctagagatgatgtacaagtatttctatatgtacctaagtatattaccattcattttcttaaaaggaatatactacactattctacacctgattttctttttttcttttttttctttttcctttttttttttttttttaagatggagtctcgctctgtcgcccaggctggagtgccatttttatcattttcaagtgtagagttcggtggcattaattacattcacatcattatgctccactgccaccatccatctctaaaactttttcatcttcctcagctgaaactttgtaccattaaacactctctactattaactttccaagaatcatgtaggattcaaactggaaatctaaggaagcttgctttctgaagacttccacatgggctatcaccggcttctaaggtttgcctaacattgagattgtttagttcgccacatgtttattgatggtctactatgttctggcactaaaattaggcatacaatatatcgctgcaatagttgaggacattgttcctaatataaaccctaagaggggccgggcacagtgtcttacacctgtaatcccaacattttgggaggctgagttgggcagatcacttgaggccaggagttcaagaccatcgtggccaacatggtgaaaccccatctctactaaaaatacaaaaatcagccaggtgtggtggtgcacacctgtaatcccagctactcaggagctgaggcagaagaatcacttgaacccaggaggcggaggttgcagtgagcccagatcacgccactgcactccagcctgggcgatggagtgagacgctattgcaaaaaataaataaataataaataaataaataaaataaaccctcagaggaatctgagttatgcagcaataaagtagggggtacttcgagcccctaaggatggagatgcctcttccttttctggaaaactgaccgctaactccaccatgttttacggagcacacacaatgtcatttaaaacaataataaaacgaataatcctggagacagatgtgaggcctgaaagcatttcccaaccctcagctgctcaaagtccattgtgtatcaaaaccactgccttataaataccctcagttctcttccatctgcccccactcgctcatctccaccctctgcctcccctagggcctgtatctgaaaggttgtgcgttgctggaggacactcaccaaggcttcccttggaattctaacctgaccccaaacctctaataggcacccatttcctggcacttctgtgtgtccctagtaatttcatttccttttctcctgtatacttgtttcttatcttcgctctcctcctgaagccactcacgcaccctcctgacatccctgccgtatacttcatggcatccgtcccccaagaccaagcccttctgtgtgcctggatcccattccctctctcctccaggcacccttgcctcccagatctctacacacacacacacacacacacacacacacacacacacactcctgcaatgcgtaccatcacattctttgaaaagcttttcttggcccagatctctacacacacacaaacacacacacacacacacacacacactcctgcaatgcgtaccatcacattctttgaaaagcctttcttggcggggcgtggtggctcacgcctgtaatcccagcactttgggaggccaaggcgggcagatcacaaggtcaggagattgagaccatcggggctaacatggtgaaaccctgtctctactaaaaatacaaaaaattagccgggcgtggtggcgggcacctgtagtcccagttacttgggaggctgaggcaggagaatggcatgaaccaggaggtggagcttgcagtgagctgagatagcgccactcactgcattccagcctgggtgacagaacgagactgtctcaaaaaaaaaaaagtaaagcctttcttgaccctgttcccctccaggtccaccccagtatcatacccacacacactctctcactcctgcaatgtgtaccactactttcttttaaaagcctttttttttttttttttttgagacggagtcttactgtcaccagactggagtgcagtggcccaatcttggctcactgcaacctccacctccaggttcaagtgattctcctgcctcagcctcccaagtagctgggattacaggcacatgccaccacacccagataatttttgtatttttagtagagacagggtttcaccatgttggccaggttggtcttgaacttctggcctcaagtgatccacctgcctcagcctcccaaagtgctgggattacaggcgtgagccactgtgcccagctccatttactgtttctttccccaccacccattcctcactcaaatccacctggggtacccctctagaactcttagggctttacagagcacagtttaaaaccactgtgtaggcctaactcttccatcctctggatgagaaaaccgaggcccaaggagggtatgaacgtgctgaaggttacacagcttgtgaacggcagtcagggcctaattccagagcttgattccaagcttagatttgttcaactagggatccccactgtagtcaagagggtagccaagggcagcaggtcatcagttcagccagagtgctaggctaaatgttctctttatttgattttgtttgaaaggctcagtcgctaaaaacagtgcttgactgtcattatctaaaatccttatcataaaaattaatagacaaaaataatttttaaaaaattatttttaaaaagccaggggctgggcatggtggctcactcctgtaatcccagcacttttgggaggccaaggcgggccaatcaccggaggccaggagttcaagatcagcctggccaatatggtgaaaccccatctctactaaaaatacaaaaattagccagacatcgtggtgggtgcatgtaatcccagctactcgggaggctgaggcaggagaatcgcttgaacccgggaggtgaggttgcagtgagccaagattgcaccactgcactccagcctggatgacaagagcaagactctgtctccaaaaaaaaagagccaggtacagtggctcacgcctgtaatcccaactattcgggaggctgattcaagagggtctcttgaggctagaaattcaagatcagcttggataacttagttagacctcgtcaccacaaaattaattaataaaagacaaaaggaaattacttttggcctggtgcagtggctcattcctgtaatcctaacactttgggaggcggaggcaggcagattgcttaagcccaggagtttgggaccagcctgggcaacaaaatgagactgtcactacaaaaaaattaaaaattagctgggtatagtggtgcacgcctatagtcccagctacttggtaggatttttttttttgagatggagtctccctctcttgcacaggctggagtgcagtggcacaatctcggctcactgcaacctctgcctcctgggttcaagcaattctcctgccttggcctcccaagtagctgggattacaggcgcccgccaccaccacgcccagggttttgccatgttgaccaggctggtctccaactcctgacctcaggtgatgagaagggaggatcttttgagtcctagaactcgaagctgtagtcagctatgattgcactattgcactccagcctgggcaactgagttagaccctgtctcaaaacaaacaaaacaaaaaacaacaacaaaagaaattatttggccgggcatgctggcttatgcctgtaatcccggcactttgggaggcaaggtaggcggattgcttgagcttagaagttagagaacagctagggcaacacggtgaagccccgtctctacaaaaaatacgaaaaattagctgggtatggtgttccatgcctgtagtcctagctactcaggaagcggagatgggaggatcacgtaagcccaagagtcaaggccacagtgaaccgatattgcgccagggcaacgagagcgagaccctgtctcaaaacaaaaaacaaaccttcttttttctagacagggtctcactctgtcacgcaggctggagtacagtggctcgatctcggctcactgcaacctctgcctcccaggctcaagtgattctcatgcctcagcctcccacatagctgggattgcaggcatgcaccaccacatcctgctaatttttgtatttttagtagagacagggttttgccacggtggccaggatggtctcgaactcctggcttcaagtgatccgccggccttggcctcccaaagtactaggattataggagtgagccactgtgcccagcctaaaaacattatttttaaaaaaattaaagaggacctgctaggtgaaaagaataaacatcatgatcatggttatcatcattataatgtctattgtggattgaaatgtagctcctgtttggccctcttgtaagggctttatgtaaactcagtttatcctgaggctcacagctattccctgacttgctgaaggccacacaactggtggtggaaagccaggatacacatctagactgtctgagtgcagaacccttgctttcagctactacagcagccccttccttggcctggtgtaacgatgtcacaggcttgaaagtcaagcctttgcacctctcacagggggcagggcatgccccagaaactcaggcctctgctgatggggtccctactccaaccttcagtgtgtggcttggctcttttctctaacctccttttggacaaacgtcttttctgtttctgctggggaccttaatcacttgtccagaaactccatggattttgtccctaaaaatatgatttcttatgatcccttctcccaagatgctctgagtcccttgactttatcttcttttaaaatttgaagtatgtcgggtgaggtggctcacgcctgtaatcccagtactttgggaggctaaggtagatggatctcgaggtcaggagttcgagaccagcctgaccaacatggagaaaccctgtctccactaaaaatacaaaaattagccaggcatagtggtgcccacctataatcccagtcactcgggaagctgaggcaggagaatcacttgaatccaggaggcggaggttgcagtgagccgagatcacgccactgcactccagcctaggaaatagtgcaagactctgtctcaaaaaaaaaaaaaaaaaattttgagatataattcacatacatgcataaaattcaccattttaatacccttctgtggcttttatttattatttttatttttgagacagggtcttgctctgacacccaggctggagtgcagtggtacaatcatagctcactgcagccccaacctccttgggctcaagtgatcctcctgcctcagcctcccaagcagctgggactacaggcatacgccaccatgcctcgctaattttttttattttttgtagagacaaggtctcgccatgttgcccaggctggtctcgaactcctgggctcaagcgaacatactgcctcagcctctcaaagtgctggaattacaggtgtgagccagcatgccaagacaccagtgatttttagtatattcacaaagttaggtgaccatcactactacctaatttcagaacatttccatccccctaaaaagaaaccttctaccttatgacccttcagcagtccctcccgactcccattgcccagccccagcaccatctactttttgtctctggatttgcctatgctgagcattttatatccatggactcaaaatccattggctctctggccctctctcaactgacttctgctgccacctctccaccaaagtgtcttttcatcctgctgccaaatacaataggcacagctaaggcgacctcattctccaccactcaactgcattcaatgcaacccatcaccctctcactgcaaagctttctcctcttaatttgagaagctcctttcctccgacatctctgaactctcctccattttctttgcacttgcttctcttccaactgatctctaaatgtttagccctcagccctagcccccttgcagggagctgcattttgtctcacagcctcaaatatcatccctgtgcaatgattctcaaatatttatttctagctctgatttcttcctcgaactgtaagacttcacattcgatctcctcctttatgcttacgtctgactgctaatagcatctggaacattcaaaacatgactcttgatttctctctccttcacctccctcacacccattacccatcattatgaaaaataaccaggccaggcatggtggctcatgcctgtaatcccaacactttgggaggcggaggtgggaggatcgcttaaggccaggagtttgaggccaaccttggcaatatataaaggccccatctctaccaaaaaaaatttaccatagatagataaacaaattagccaggcatagtggtacacacctgtagttccagctactcgggaggctgaggcaaaaggattgcctgagcctaggaagtcaaggctacagtgagctacgattgcaccactgcattccagccaagcaacagagtgagaccctgtctcaaaaacaacaacaacaaaaaaaaaaacaaaacaaacaaaacaacaacaacagaaaaaagaaattaaaggtagaaaaataaccactacccatgagattgatcaagccaaaaactgaggcctcacctccctgtccactgtctccttaacacaaatcatccacaaatcccccatcagctctacctccaaactatgtcccagggccactcatgtctctctaactctacagccacccccatcacctcagccactaatgtcaccagcctggacaagtgccatggccagtctccggcagcagacgcccttctaaaacaaacatcacaccacgccgttccccttctgaaaggggcttccaagtggcttccaagctcccaccattgccgccaaggcctccttcttacctcacttcccatggctcccttccttgtcctggtgctcttgccaaaaggccttctttttgcctctccggtaggagaagcttattctgctgcaggggctctgtacctgtaagtgcccctgcccagaaggcctttcttgtccctctgcaactggctcgaacctcctggtcactctcatgtctggtccatccctgcctagatagagcctcgccccctccccagtcattccaccctgttacaggtcttttttcctttacagcacttatcaaaatcctgaacatttatttgctgactttaatgccagcttcgctggggggcagggaccttatctgtgtaatgtaaactggagctctgacacctaagagagtgtctggcacccaactgatcctcaatcaatatttgttgaatgaataaatgagtgttgttacagagggaaggtcgagggtacatcattaagtgtggcaaagtgcagaggagaacgtcattaagtatggcatgaatcctagcacttggggaaaattttagggtttttttgcagacagagtctcactctgttgcccaggctggagtgcaatggcgcgatctccactcactgcaacctccacctcccaggttcaaactgttctcctgcctcagcctcctgagtagctggggttacaggcgtgcaccaccatgcccagctaatttttatattttcagtagagacagtgtttgccttgttggtcaggctggtcttcaactcctgacttcaagcaatctgcccacctcagcctccaaaagtactcagattacaggcatgagcaccgtgcctggcctcacgtggggaaaattaaaggcggtaactgtgcaggtgaacttgaagacactcaaatgcttcccaaatctcccaggacatggctgacactgcctctagggcgtacagagggattgtcttaactttcacaggttgtcttaagcacttctgtaccattagaatttttttttgttttttatttttttcactatgagtatgtattacttttgtaattaaacaatttgatcagaaaaatagatcagttgattattttatctacaggatatttttaaaagtttgctagcagggtgcagtggctcacgcctgtaatcccagcactttgggaggccaaggtgagaggatggcttgagcccaggagttcaagaccagccttggcaacatagcaagaacctgtctctacaaaaaaataaagaataggctgggcatggtggctcacgcctgtaatcccagcactctgggaggccgaggctggcagatcacaaggtcaggagatcgagtccagcctggctaacacggtgagacccccgtctctactaaaaatacaaaaaattagccaggcatgttggcaggcgcctgtagtcccacctgcttgggaggctgaggcaggagaatggtgtgaacccggaaggcagagcttgcagtgagccaagattgcaccactgcactccagcctgggtgacagagcgagactccgtctcaaaaaaaaaataaaattaaaaaagaaaatgaataaagaaagaaagaaagaaagaaagaaagagcgagccaggggtggtagtgggtgcctataattccagctgctcgtgtggctgaggtgggaggatcacttaaacccaagagatagaggctgcagtaagccatgatcataccactgcaaaccagcctgggcaatagggcaagacgctgtctttaaaaagaaaaagtttgccaattttctctttgacccaaggtgagcacattacagtgattacaagcctgggagtccagtcatttgtaccatgttacacaggcaggagacagagggtctggtaaacacctctggggctgaactcatgcagatttcactccacgccaccactgactgcccagggaggtgtcagcgctcaccatggatgatgtggagtccaggaggctcacgactttcatctcgatctcgtcctcgccaaagctcttcagcagcttcataacctcactcagcgtcagccacttacaatccacaagctgaatggagacaatataatctccttcccgggctcctgccacctgaaaaagtattgttgaaattaagtcaacgttttgttcactcaaatccttgaatcagtccccattaacaaaataggtatttgcgtaagttcgcatcaagaaagcaaaaattcactttgggtggctgagacgggtagatcacttgaggtcagtagttcaagaccagcctgtacaacacggtgaaacccatctctactaaaaatacaaaaatcagccaggtgtggtggtgggcacctgtagtcctagctacttgggaggctgaggcaggagaattgcttgaacccgggaggcagacattgcagtgagccgagatcgtgccactgccctccagcctgggtgcaattaaaaaaaaaaaaaaaaagccaaaattggccaggcacagtggctcacgcctgtaatcctagcactctgggaggccaaggcagacagaatacttgaggccaggagttcgagaccagcctggccaacatggcaaaaccccatttctactaaaaatacaaaaattaggccgggccaggtggctcacacttgtaatcccagcactttgggaggccgaggtaggcggatcacaagatcaggagatcgaaaccatcctggctaacacagtgaaaccccgtctctactaaaaacacacaaaaaattagccaggcatggtggcacgcacctgtaatcccagctactcagcagcctgaggcaggagaattacttgaacccaggaggtggaggttgcagtgaaccaagatcgcgccactgcactccagcctgggcgacagagtgagactgcgtctcaaaaaacaaaaacaaaaactaaaattagctgagtgtggtggcacgtgcctgtaatcccagctactcaggaagctgagacaggagaatcacttgaaaccaggaagcagaagctgcagtgagccctgagatcgcgccactgcacgatcgcgactcactgcagcctccacctcccaaagtctaaaaaaaactaaaaacataaaacaaacaaaagaaagacagtaaaaattaatccttttcttttagggaatgtagcacccatgaggcccttcacatcaagtcaggcctttgacatgggtgaacccaccctaaattcaatcacccagatatctgtgtttgctgccaatcaagaaaagcatgtgcttaccgaggcagagcagtaaggatccaggaagtgaacctgaacgggggcgttccctctcaaggtgaaccccaagtccccttcttctgcagtgaagcggatgcttcgaggaggcgtccaccgcttgttagccgaaaacacagataaggggccctttggaagagagcatcgttaggtgtaggatttgaaggctggatcagacgcttgaaagctaaagggaattttgcctgctgtccttgaagatctcacttggccttgttcagggacaaatgacacatctgggggcatacatgctacagcagtcatgcgagaacctggaaagccatcttctcaaacatacccaatatattttcaataaaattatcttttaggcattgtattaattatctttttctctttttttttgagacattgtctcactctgtcgcccaggctagagtgtggtggtatgatctcggctcactgcagcctctgcctcccgggttcaagtaattctcctgagtagctggaattacaggtgcgaaccaccatgcctggctaatttttgtatttttagcagagatggggtttcaccatgttggccaggctggtctcaaactcctgacctcaggtgatccgcccgcctcagcctcccaaagtgctgggattaaaggcgtgagccaccgcacccggccaaaattatcataaataaaatctctaatataaaaaatgtaagactaggcatgtcatgcctgtaatcctaagcactttgtgtgaccaaggcagaaggatcgctcgaggccaggggtttgagaccagcctaggcaatatagtgggaaccattctctactaaaaacataaaagaattagccaggcatggtggtgcacgccaatgctcccatctactcaggctgctgaggcaggaggacttcttgagcccaggagttcgaggctgcagtgaactatgattgtgccactgcactccagcctgggtgaaaacagagttagaccctgtcttaaaaaaaaaaaaaaaaaaggaaaaaaatctcaggccaggcacagtggctcatacctgtaatcccagcactctgggacgcctaggcaggagtatggtttgagcccaggagttggagaccagcctaggcaagaccccatctctacaagaaatgaaaattagttggacatggtggtgtgtacctgtagtcccatctactagggtagctaaggcaggaggatcgcttgagcccagaaggttcaggctgcagtgagctatgatcatgccgctgtaatccagcctaggtgacacagtgagaccatgtctctaaaaaaactaaaaaatatttttaaaaaattttaaatagacaatacctaaaaactacctttaaaatatgctatggggccgggcacagtggctcaggcctgtaatcccagcactttgggaggctgaggtgagcggatcactggagcccaggagttcaagatcagcctggccaacatggtgaaaccccgtctctactaaaaatacaaaattagctgagcgtagtggcacaggcctgtaatcccaactactcgggaggctgaagctggagaatcacttgaacctgggaggcggaggctgcagtgagctgagatcgcaccactgcactccagcctgggcaacagagtgagactctgtctcaaaaaacaaataaataaaaataaatgaataaaataaaatatgctatggtctgaatgtttgtaccctcccaaagtttgtatattaaaatattaaaattttattaatatttattaaaatttaaaatgtatattaaaatcatcaatgtaattattaggaagtggggcctctcgagaggtgattcagtcttggggtggaaccctcaagaatgggatacatgcttttaaaacaggcccaaggaagctcatcaccttttctgccatgaggacacaggtagaaggccccacctataaaccagaacatgggccttcagcagataccgaatctgcccataccttggtcttggacttcccagcctccggaactaagaaatatatttctgctgtcataagccccccagtttgaggcattttgttatagcagcccacatggactaagacaccatactcgccaaagtgaagagctgtccccttaggtcatttgaatgtagagagcattcaacataccagcttctggaagaagtccgtgactgtcagcttggagaactggggcaatataatgtcaacctcttgctcagttttagctagaatagaggattagaaatgggaggataaacgtttctgtaattgaaagtgatcctaatagtccagtgttgtggctcacgcctgtaatcccagcactttgggaggctgaggcaggtggatcacttgaggccataagttcaagaccagtctagccagcatggtgaaaccccatctctattaaaaatacaaaaattagccaggtatggtggcaggtgactgtaatccgagttacttgggaggctgaggcaggagaatcacttgaacccaggaggcagaggctgcagtgagttgaagtcatgccactgcactccagcctgggtgacagagtcagactccggggggaaaaaaaaagtgatccttgggaaggagacagtacagaactttctcttagtcacacatccttcccctcggtttagacaagtagcagaagaagatggaacagagctcaacccccgacctagggtgaactgtaccttccatttgggtgcctccagtgagccatgggaggtataactccttcccgagctgggaccaaggagtgataaccagacacattcccatggggtttcctgatacttaaggggcttagtgggcttctctggcactcataaaaccctaatgaggaggccaggcacggtggctaatgcttgtaatcccagcactttgggaggccacggtgggaggatcatctgaggtcaagagttcaagaccagcctggccaacatgatgaaaccccatctctactaaaaatacaaaaaattagccaggcgtggtggcatgcgcctatagtcccagctacttgggaggctgaggcttgaaccagggaggcagaggttgcagtgagctgagatcacgccactgcactccagcctgggtgagacaagagcgaaatgacctctcaaaaacaaacaaacaaacaaaaaaacctattgagaagtcatctatgtttcaagtgttgttgttatggaagttccatgcctcactggacacagtcctgggataccgtgctttctgttttcatcattattactattttgagacagggtgtcgctctgtcgcccaagctggagtgcagtggtgggatcacagctcgcttgcagcttgacctcctggactcaaatgattctcctgcctcagcctcccgagtagctggaactataggtatgcaccaccacacctgatgaattttttttttaattttttgtagagatggggtctcactatgttgcccaggctggtctcaaactcctgagctcaagtaatcctcctgcctcggcctcccaaagtgctgagattacaggtttgagccaccgtgcttgaccttttcattattaatgtggtatgaggatttcccagtgaaaaggaggtttggcaaatcatgaccactgacagctacatacccccaccagcatcttcacagcaggctcggactacccttaacataaggctggtcaatttctaacaaaggatcccagggcaggctgattctacacgagaacaaacagcataaaaagtgtatctaggccaggtgtggtggcttaccctggtaatcccagcactttgggaggccaaggcaggtggatcacttgaggtcaggagttcgagaccagcctggccaacatggtgaaaccccatctctactaaaaatccaaaaattagctgggtgtggtggtgggtgcttgtaatcccagctcctcgggaggctgaggcagaagaatcacttgaacccgggaagcagaggttgcagtgagccgagatcacgccactgcactccagcctgggcaacagagcgagactccatctcaaaaagaaaagagaactccagggcaaaagcagcacctcagtccctaccctgtgcagctctccttgtgccaagcacacagcgagggctcgctcaacccccacaggccaggcgtactctttccgcggcacaggcacccccacagagggaacacagtctaggctactcaccaacaacactgggggcgtcgatcaggttcagcaggtcatcctcctcctggtgctgggcgtacgtgagccgggagcgttcctgtgcggcacacagcaccttctgtagcacctcaatgctccgcagcttcttgcagaggctggcctcccgcaccgactcctcgtgatgagccatggctctgcgcaagtgggacttccctgcagacggaagccagcacccacgtgacttgcagatccaccaagcagagcataaaggcccaaggggcagcccaagaggttggatgttctcttttctaaaggatctgcctggatagctagagcctgtgataccctaccttgttttaacctgagtgactctctcctagcagagagagccggacagactccattttagtttcttcacttgcagcccccacttatcccccttaagagaataactagtgtaagctgactccaagcacacccaggaatgcaaactgctgataagatactgaggcaggctgtaccagcagctcctggggatgtgctcagtggcaggtacctaaagcccctgcatttatctcttagtgatagtttaagcccctgcacctggaactgtgtattttttgtaactgcttctataaccaattacttttttttaactttttgcctattctgcttctgtaaaattgcttcagttaaacccccctcccctatttagaccatagtataaaagaaaatctagccccttcttcgggcccgagagaatttcgagcgttagccgtctctcagtcaccggctaataaaggactcctgaattagtctcaaagtgtggcatttctctataactcgcttggttacaacaagccttttattaaaatattatttttttcattttatattttatatttagagacagggtctcactttgtttcgcacgctggagtacagtggtgcaatcatggcttaccgcagcctcaaactcctgggctgaactgaacctccctcttctgactcttgagcagctgggaccacaggcatgcaccaccacacttggataatgttttcactatcatcatcatttcattatcattgctatgttgcccaggctggtctcaaactcctggcctcaagcaatctgcctgccttagcctcccagactgctgggatgacaggcgtgagtcaccgcgcccagcccaagcctcccttcaatgcgtatgtaataacctcacttgtgtccataagatgttcactcaacaaatatttaccaaatgtgctgggcactagagataaagcaacgagtaaacaaactgcccccacattcatggagtttacatgtagtggttgacgacagataactaacaagacaagaaatatgtaatggatggggtggtgatgaggttatagggaaaaataaagcagggtaagcggagatggtaagagaagactgggaatggggttgtcctatgatgggtgacagagaaaggctttttttttttctttcttgagacggagtcttgctctgtcacccaggctggaatgcagtggcacgatctcggctcactgcaacctccacctcccaggttcaagcaattctcccacctcagcctcccaagtagctggaactacaggcacacaccaccacatctggctaagtttttgtatttttggtacagacggggtttctccatgttgcccaggctggtctcaaactcctgacttcaagccatcctcccacctctgcctcccaaagtgctgggattgcaggtgtgagccaccacacccggccaaggaaagctttgtgatatggtcctttttgagcagagccctgattgatgtgaaagagcagcaggtgcgagggccctggggcaggggcacgtgcaggttttcaagggcaaggaggagctagggtgtgcctggaggcagggagggtgggagagaatgagtgcagggaagaaagagccaggccagatcatggcggacctcacgcgtgtgagatgagggctctcgctcctgttctgcgtgagacgggagcccactggagtgagagcaggggactgatgtgatctgacctgcacgaccaggctctgaaggggcagcaggaaaacccgctatgagcagggcaagccacgtgacctctctgggtctcagtttcctcagctgtaaaatggggatgccacgagacgcacctcatagtgttgtgtggggtttaagtgagtgaatgtttgttaaataagcactgtacacatgtggcttccaccagggcagcaggattaaagtggccagatttgagatatgttttctaagtacagccaaagggatttgctaatcaaatgtagggtgagaaagtaagacaagaggttaggtgtggtggctcatgcctgtaaacccagcactttgggagacagaggcaggaggatcgctggaggccaggagttcaaaaccagcctgggcaacatagtgagaccgcatctctacaaaaacctttttacaatattagccgggcgtggtggtgcatgcctgtagtcccagctactcaggaggctgaggcaggaagatcacttgaagccaggagttcgaggctgcactgagctgtgattgcactactgcactgcagcctgggggacagcaagatgctgtcaaagaaaacaaatgaaagaaaaggaaagaggaaaggagggaggacgggtagatggggaggagagagagagaaaggaaagaaggaaagaataaaggagagaggagaggaaagggagagaaaaggaaagcaacaaggaacaaggaaaggagaggagaggggaggggaggaggggagaggggaagggtgaggggaggagaggaaggaggggagggagagggaggaccagaggagagaggaaaggaggggagaagagaggaggagagagaaggggagcggagggtaacaggggagggaagaggagaggagagaacaggagaggaggggaagggaggggaacagaggggaggagaggggaggggagcagaggggaggggatgggaaagaggaggaaagaaaagaagcgtggagagtgagtccaaggtttctggcctgagcacctagaggggtgggagttgccatcactgagacggagaagctgcgtatgtgtgcatgggtggtgcgcagaggggcaggttagggtggtggaggtgaggtctgcacatgggaagagatattcacactgagacatggcagagaccaaaccaggacactgcattaccagtcattaggtgttcttggtaattcagccatgcataaggaaatcaacaaacgtctccttccctgttagcgtgacacatgccaccctgtggaccccaagggagatggttaaagtcctggctccacagtgggaggcctgggtgctatggaacccatgagaacacagcctgggaagccctctgaggctcaggaccgcgcctcatgacttctgaacccaaagtggccacgatgactcggaacacccccctctcccgggccctcttcagggacctctctgtggctggctgtgagcaggaccagctgggcaccaagtggggcccacatctgggtgcagggggacacgcacccagctgtcggcgctgctgatcattcttcagtgtggccaagggtgtcagcccctctggcatgtggtcgtagagctgggacaggcacttctcctggtggtccagatccgtgcctggcttcactgcaaagagaaccacaggttaaatcccctctcatggacctggccacagacccacgtagagatttctctaccatgtctccagcttccttttttctgcagtttcacaaggcatttgggatcatgggtctcctttctgcccccggacacaccccaggccgtctaaccctcaaggttttcttttctttgagacggtctcactctgttaccaggctggagtgcaatggcacaatcatagttcactgccgccttgaactcctgggctcaagtgatcctcccacctcacctcctgagtagttaggactacagacatgcaccaccacatgccaggctaatttttaaatttttttgtaaagacaaggtcttgctacattgcccaggctggtctcaaacccctgggttcaaacgatcctcctgccttagcctcccaaagtgctgggatcaaatgtgtgagccactatgcctggctaccccaaagctcttgctcactgggaccagtcacactccagaggttcataatttttttttttttttttgagatggagtttcgctctgtcacccaggcttgggtgcagtggtgtgatcttggctcactgcaacctccacctcccgggttcaagcgattctcctgcctcagcctcccgagtagctgggattacaggcacatgccaccatgcccggctaatttttgtatttttagtagagatggggtttcagcatcttggccaggctggtcctgacctcgtgatccacaccgatttcggcctcccaaagtgctgggattataggcgtgagccaccacacccggcaaggtttgtaatttgaccctgagcccccacacgctacctcctccaactcacccaccacacagaacctcctggcatagcccagaccctgtcatgcccggcctgcacccctctgcgggcctgcacacctgcagcagagccccttcctgcttcaaccacacccttcgtggcgcgcatcctgctctcaaacctcacaaaaccactctccacttccccagcaccctccgcctctgttctgtgctcagacactttactccctctaggctgacccttccctcctgtgcagatggaaaagttgaactcaaatgtcactgcctctaagaagccatccatgactgtaccatggagtccacctgctgctgcatttgtgtctctacagcaatcaccgaggcactatatggtatttctatttgttttcacatcttgtctcacctaatagactatatagtactaggagtggcggctcacactttcagagaacctacagtatataaagcattattgagctttgcgtacaggcccttcgttttcgttttcatgacagcctgtgaggcaggttctctccatatacccattttacagatgagaaaattgaggcagaggacagctaagtaacttgcccaaggtaaaacagctcattcatggaagagctgagatatgaacccaggaagtctggctccagaggctgtctttttaattccttgggaggctgcctggattagtactcattagatcaaaaatccctggccaggcaccatggctcatgcctgtaatcccaacactttggggaggccaaggcaggacaactgcttgaggccaagagtttgaaaccaacttaggcaacatagtgagactccatctctataaaaaaaaaattttttttaattaactggtgtagtggcatgtgcctgtattcccagctatttgggaggctgaattgggaggatcgcttgagcccaggagttcaagaaggcagtgagccatgatcataccactgcactccagccccatctctaacaataaaataaaataaataaaataataaaataaaataaaattccgatcatcacagattttttttgcattaatttttattttattattattagtttttttgagatggagtcttgctctgtcacccaggctggagtgcagtggcacaatctcggctcactgcaacctccacctccctggctcaagccattctcctgcctcagtcacccgagtagctaggattagaggcacgtgccatgccctgctaatttttgtatttttagtagagacagggtttcaccatgttggccaggctggtctcaaactcctgacctcaaatgatctgcctgccttggcctcccaaagtgctgagattacaggcatgagccacagcacctggcctgcattaattttgattcttttaaaatattaccttaaaatgttacttatcttgatgccagcatttttggccttcccttagattctagattccaggtgaaaattcatcctcttgcacccaggcagaattaaaggtgcctcttcttcctccctctaaagaagcttataacccctaaccccaccatggcctgtgcggcagctgcctcagtcatgggtcactcccatcctctgccttcagcctgtgagcatctccagggaaggcagttagctctcactcagctcagaatcgcccctggggcagctggaccacagccctcgccaaactcccgaaccccccaggccttaccctggtggtcgatgaggaggatggcagtgaagtagtgggccagggccgcgtagtggtgggccttcacgcaggctaagctggcccaggagtaggggatgttctctttcaccggcgcctggctcatggctgcgtgtagctgttggtagacctctcccacctgaaatagaagggacactgggaaggggcagcccggcacaagggccctcatgaacccatttgcagagaaagagccctttcttcttcccatgcaacagcccctgccaggggctgctccagaatctgggagcaactccaagagacccctcgttctgtcattgtcacagttaacagggggatcaggctgctgtcattatgctggtttttaggttaagctgcagatggaatcagtgatctgtatctgaaacaccaacacttgccaagaaaactcaagccagcagtactggccggagctggcacaatgcccaggtcacaggcaagctcccatgggaaggccccgctacttccagtgctcctgtgccagcatctcctgcccactccccaaagtcacaggaaccagggagtcctaccttagcagcctcctgagccaccttcaccagcatgaagaattcattccggatcccaggaaggctgattttctcaaacacgctttcttgggcttgtgcaagcatcattttgacgagcacgctgagcatggcagggctcatgtcgtaacttggagtatgggtaaatgtgtctttcaggtaatttaaaacccctaaaagtggaaaatgttttgcccattagttcgggttcatatttacttcatcacgttgctatagagaaagataggaggccgagtgcggtggctcatgcccataatcccaacactttgggaggccgaagtgagcagatcacttgtatcaggaattcaagaccagcgtgggcaacgtggtgaaaccctgtctctacaaaaaatacaaaaattagccgggtgtgatggtgtgcgactatagtctcagctcctctggaggctgaggcaggaggattgcttgagcccaggaggcagaggttgcagtgagctgagatctcactactgcactccagcctgggtgacagagcaagactctgtctcaaaaaaaaaaaaaaaaaaaaaaaaaggaaaagacaggagaaaaaaaaaagaaccggtgtcctacaacatattaaaaaatttgattctcaattatatggtccagcaattccactcctatgatatatatccccaaacaattgaaagtgggggcttaaatgacacttgaacacccgtgttaatagcaacattattcacaagagctgaaaagtggaaaccacccagacgtccatgagcagatgaatgattaaacacaatgtggcctatccatacaacagaatatttttcagccttaaaaaggaatgaaattctgacacatggtacagtgtaaataaggacattatgctaagtgaaacaagccagtcacaaaaggaccaatattgtaggattccatttagataaggtacccggaatagtcaaattcacagaaatagaaaggagaatagaggttagctggggctggaaaagcgggcaatgggaagttattgtttaactgagtacagagctttgctttggatgatgaaaaagttccggagatagctgggcacaggggctgctgcctgtaatcccagctataaaggaggctgaggtgggagggttgcttgacattaagagttcaagaccagcctgggcaacgtactgagacccctgtctcttaaaaaatatatactttttaaaaatgtatttattttatttatttttgagacaagatcacactctgttgcccagactggagtgcggtggcacaatcatggctcactgcagcctcaaactcctgggctcaagcggtcctcccacctcagtctcctgaagagctgggactacagccatgtgccaccctacaccaagctaattttaaaattttttgtacagatggggtgtccctatgttgctcagactggtctccactcttggattcaagtgatcctcctgactcagcctcccaaagtgctgagattacaggtgtgagccaccttgcctaaccaacaaaaaaagtttttaacttctggagatgtttagtggtaatggctgcacaacactatgaatgtacaaatgcacttaatgccattgaactgcacacttaaaaatggttaaaatgtgcttctggttggcaggataattttaaaatttttaaaatttaagataataattaaaatggtaattttatgttctgtgttattttactataataaaaaaactggttaaaatagtacattttaagttatatatgtatattttaacactatttatttatttatttataaataaacacccaggctggagtgcagtggtgtgatttcagttcactgcaacctctgcctcccaggttcaagcgatcctcctgcctcagcctcccaagtagcagggattacaggtgtccaccaccacacccagctaatttttgtatttttagtacagacggggtttcaccatgttggccaggctggtctcgaactcctgacctcaggtgatctgcctgcctcggccactgaaagtgctgggataacaggcgtgagccaccccacccagccttttaacccaatttttaaaaattggattaccttccaaaacacatctctattgagtaaagaaaccagcctgctccccacaactcctgtgtcacctgggacaaaattccatcacgacaggtatggagatgcaagcagacggcaggcagaaggactaaggggctcacaggggaccaggctcacacataagatctgagtcattcagcagtccagggcttttcccctggacctcaagaaagatctattctggccaggcgtggtggctcatgcctctaatcccagcactttgggaggccgaggtgggcggatcacctgaggtcaggagttcaagaccagcctggccaacatggcaaaagcccatctctaccaaaaatacaaaattagccaggtgtggtggtgcacgcctataatcccagctactccggaggctgaggcaggagaatcacttgaacccgggaagcagaggctgcagtgagccgagatctcgccactgcactccagcctgggcgacagagtgagattctgtctcaaaaaaaaaaaaaaaaaaaaaaaaatctcaatccgtctgctccaatggaaattttcatgctgcagccttcctctgacttctttgtagtttagaaaattaactgtccaaagcgctaactgacaatcaatctggaactgaaatagaatctctcatatgaatcccatccaactggttcctctggttttgttgctgagcaaaaaaaaaaaaaaaaaagccctgccctgcggagggatggcacctgctgttttgagctgcgagctccatgggggttccctcacactccccactgttctcctacttgcttcatttcgtctatagtttgtctccattgatataatctcagagacaggacacagagtgcctgcctaagattcctcagaaagatgagtccagaaaaaagatttacagcaaaagaaatcaactcatacttggaatcttagcatatcgcttcatcccgatagaccaatcttttatttttttaattaattaattattttttgggacagggtcttgctctgtcgcccaagctggagtgcaatggcgcgatcttggcttaccacaacctcggctgatccttctgtctcagcctcccaagtagctgagactacaggcatgcaccaccaggcccagctaacttttgtactttttgtagagatggagtttcgccttgttgcccagactgatctcaaattcctgggctccagcaatccacccacctcagcctcctaaagtgctgggattacaggcatgagccaccatgcccagcctatttcattaatttaaaaaaaaaaaattctttttagggatggagtcttactctgtcacccaggctagagtacagtggtgcaatcatagctcactgcagcctcaaactcctgggcttaagtgatcttcccgtcttagccactggagtagctggaactacgggcatacaccaccacgcctggctaatttttaaatattttgtagagatggggtcctcctgtgtggcccaggctggtaggaccaatcattataacatcagaaatttcacgatgagtcaaagtggcaaagctatggttcttcacaagcttgcagggcaaagtgatatcaaacaatgatccacacgggtggaaggggatcacaccccaaagcagaatgtcgatgatcagcccagaaggcaacacgctatagagctagcgtggggaacacactgtggtctacactgtgccctgctcttgcatccatccccacgtggagtctgacccagacacagccctgctatgggggagcaaggcagaacccgcaggcacaggtgagccaagccaggctcacccacagcgctgggtctgttgaccccagtcctctataggtgtaagcactaggctgcttttctcctcaacaccgcacctcattctcatactaagattacctgaggtcaggagtttgagaccagcctggccaacatggcaaaacctcatctctactaaaaatacaaaaattagccaggcatggtggcaggcgcctgtaatcccagctacttgggaggctgaggcagaagaattacttgaacccagtaggcagacgtcgtagtgagcagagattgtgccactgcactccagcctgggtgacaagagcaagactctatctcaaaataaacaaataaataaaataaaataacaaaagacagttcccagaagaagggaactgagctatgagacatcctttgaatgcatcacttgacaaagggttgagaacacccacctcatgctggagaagttggcagaatgcaggtgatataaaggcatggaggggcagggtgcggtggctcatgcctgtaatcccagcattctgggaggctgaggcaggcggaacacctgaggtcaggagttcgagaccagcctggccagcatggcgaaaccccatttctactaaaaatacaaaaattagccaggtgtggtggcgggtgcctgtaatcccagctactcaggaggctgaggcaggagaattgcttgaaaccaggaggtggaggttgcagtgagccgagaccatgccactgcgctccagcctgtgcaacaagagcaaaactccatctcataaataaataaataaataaataaataaataaataaataaaggcacggagagtaatacgcactgataaggtacacctaatacaagaaaaagaagcctacagtttcactatttgggaaaagttattctgctcttcatgacagtgttgaaagaaacagttatgcactgccatcccaggggccacttgtctggaaaagatcgtcagccacaggattcaccatgtacatcagccatcccagactgaggtctgaaccaccgagcaagtttttttttttttttttgagatgcagtctggcctcgatctcctgaccttgtgatccacccgctttggcctcccgaagtgctgggattacaggcgtgagccaccgcgcccggccggagcaagtttcttaatgggaagttacaccagagctggagactggtctggcccttgcgagggatgacctgtagattctcttcagtggggggtcccctggtgccaccgggtggggccaaggctccgtctggtcagccctggaggagacatacctgcggctctctgaaaggcatctatggcactctccagcccagcctgcgtctgccgatcacaccgggtcccaatctgggtgtagagggccccagtgttgaacaggacactggccttctccagcagcaggttctgctggctgaccggaaccccggtgagagagtcatacctatgtgaaagaaatgcattccgagaatacagattacttggctagttaatgctacaagtggaaaaaattctttttttttttttttttaagagtcaatatctcactctgttgcccaggctggagtgcagtggtgtgatcatagcttactgcagccttcaactttagggctcagttgatcctcccacctcagcctcatgagaatagctggcattactggtgcatgccaccatacctgcctttttttttttttttaatttttgtagagatggggtctatgttacccaaactgctgtcaaactcctgggttggctgggtgcggtggctcacgcctgtaatgccagcactttgggaggccgaggcaggtggatcacctgaggtcaggagtttgagaccagcgtggccaacatggtgaaacccagtctccaccaaaaatacaaaaattagccaggcatggtggcgggcgcctgtaatctcagctactcaggaggctgaggcggaagaatcacttgaacccgagaggcggaggttgcagtgagctgagatcgcaccactgtgctccagcctgggcgacaacaacaacaacaaactcatttcttcagtaaaagtcaagaatgcatgtgcactgaggcttttgtttccaagcaagatgacaggactaatcacactgaccgccacagccacacacaaaaatatctgacggggtaactggataaacacaccatgggacatccagacaatggaatattactcagcactaaaaatggagaaatgaaccagcaagccatgaaaagatgcagaggaaacattactaagtgaaagagccaacctgaacattgctacctactgtatacgctgtgtgattccaacattctgaaaagccaaaaccctggagacagaagaaagatcaggggttgccaggacttagggggagggagggagggggagcacaaaggatttttccagtagtgaaactcttctgtatgacactgcaaaggtggatcactgtcattctatgttggccaaaagccacagaatacacaagtgcaagaatgaaccctaatggaaactatggactctgggtgataatgatgtgtcaggtaagttcttcaattataaaaaaaaaaaatgggctgggagcggtggctcatgccagtaatcccagcactttgggaggccaaggcggtatggcttctcctaaatgaaatatggcaattactaacccctcataattctttctgaaatctaaaaactcaggatttgttttaatttgttttactttttattttttcagacaaagtctcactctgttgcctaggctggagtgcggtggcatgatcatgactcactgcagcctcaacctcctgggcttaagagatcctcccatctgagcctcccaagtaggtgggactacaggcatgcaccacccatgaccggcaaattttctctaattgttttgtagagatagggtctcactgtgttgcctagactggtctcaagctcctgggctcaagcgatccacccaccttggcctcccaacctgctgggattacagatatgagccaccacacccagcctaggacttgttttatttttattttttttattttttattttttgagacagagttttgctctttcgcccaggctagactgcagtggcgccatctcagctcactgcagcctccacttcccggattcaagtaattctcctgcctcaacctcccaagtagctgggattacaggcacccaccaccatgcccagctaatttttgtatttttagtagagacagggtttcgccgtgttggtcaggatggtcttgaactcctgacctcaggtgatccacccacctcggcctcccaaaatgctaggattacaggcgtgagccaccgcacctggccctaggacttgttttaaagtttactcatgaaccagggggtgtgcagacagcttctccctaattcatgactaaggagaaaccacctttcgccttttcggccatgcagacagcctggtgcattgttaggaaaagtcatccccctttcctttgctttccatgaggaaggcattagtagccacccatcagctgtagaaacattgaattctgatatgcccctgatcttctaggatgtgttctcctttcactgacactcctaacgacactcagagaaggggtgcagcatctccaaagtacttttttttaggttgtttttttttttttttgacacagagtctcactctgtcacccaggctggagtgcagtggtgtgatcttggctcattgcaacctctgcctcccgggttcaggcgattctcctgtctcagcctcccaagtagctgcgactacaaggcacgcgcaactatgccttgctaatttttgtactttttactagaagcagggtttcaccatattggacaggctggtctcgaactcctgacctcgtgatctgcctgccttggcctcccaaagtgctgggattacaggtgtgaaccaccacgcccagcctttttttttcttgtttgaaaaagggtttcactcctatcatccaggctggagtacggtggtgtgatctcggttcactgcaacctccgcctcccgggctcaagtgattctcctgcctcagcctcacaagtagctgggactaacaggtgcataccatcatacccagcaaatttttgtattgtttgtagatatggggttttgccacattgtccaggctggtctcaaactcctgggctcaagtgatctgcctgcctcggcctcccaaagtgttggcattacaggtgtgagccactgtacccggcctcccaagtatttaaactatactaacctttgaaaataccaattgggtctacggccataccaccctgacgtgcctgatcttgtctgaaaataccaattgtggagaagaatcaaatgctctacttcctttttttaaatctgatctaagctgagtgagtagctcatgcctatagtcccagctattcaggaggctgaagcagaaatatcacctgagcctaggaattcaagactagcctgggcaacacagtgagaccccatttcaaaagaaacctgatctatttctgtttggtgcttttgcctcactggataagacctgattttctctctctctctcactcacacatacacatgcatgcccctgtccaatctgagataagaatctcgcttctggctaattccacttcagagcccccgtgcttccccagtgatacaacgagcaagaaaaatgtctcttctccttggctcgcttgttctgagaagcaagaggccacagtctgttggagccatctcccctcggatcaccttcataaataaataccaatgtattgacatcttttgagacttccccagataaatgcaagataggaaagggggctgaggtgcacaggggcacccgcagaggggcgtctgtgatgctgaggctccaaaattgtggctgccataacacgtgaagcgccagcgcagacctcaagcacctaccaggtgaacaggagtcccatctgccgtgtgggcgggaagaatcgactctcgacaaagcccagctggatgaagtatgtcatcagcagttccaccccggcctcatcccggctaggcgtccgacaagcctgcaaggaaaagaacccaagagggcatgagcagaggaggacacagctgatggcccttcccagaaggtgccctgcacataccagcaggtgcctgtaactatttctgcagtatgatgacctcgctactggcatcgtaaactctgggaggggtggaaagaacctgggaggaagtcagaaatcctggaatccagtcccagccctgaggcagggctctccccttctatggttttccttctttttttttttttttttttgagacagagtcttgctgtcacccacccaagctggagtgcagtggtgcgatcttggctcactgtaacttccacctaccaggttcaagtgattctcctgcctcagcctcccgagtagctgggattacaggcgtgtagcaccatgcctggcttgtttttgtatttttagtagaaacagggttttgccatgttggccagtctggtctcaaacttctgacctcaggtgttccacccgcttcagcctcccaaagtgctggaattaccagcatgcaccaccacgcccagctaatttttgtatttttagtagagacagggtttcaccatgttggccaggatggtctggaactcctgacctcaggtgatccgcccacctccacaccccaaagtgctgggattacacaggcatgaaccaccgcgcctggcctccttctacagttttcttatgcagcaagtggaatggatgattccagcaccccccaaccatcacctctatccacccgcgattctgttaagaccacaagcgtgcaataatggggttccctgaagactcggaaaagccaccctcccctctctgctgcacacaaaaacttacttgtctcagatccataagatctgcaatttcatcttcatataaatagccatcttcactgtaatgttccaggataaaatccttaaagaaaaatgaggtcagatgttataaagtgtggctgaaaaccatatgtgtgcataatagtaatatgtcaattgtgaacccatttttaaaaaggcagaataaagaaaaacttatagtgattttcaaagtgggggaatttattttcttaatttatgtagttttttttaatacggagtctctctttgtagcccaggctggagtgcagtggcacaatctcggctcactgcaacctctgcctcccgggttcacgcaattctccttcctcagcctctcaaggagctgggattacaggcgcccaccacaatgtctggctaattgttgtatttttggtagagacagagtttcaccatgttggtcaggctggtctcaaacttctgacctcaggtgatccccccacctcgccctcccaaagtgctgggattacagatgtcagccaccgtgcccggccatagtttttttttaaaaaaacaaaaacaaaaaacaaaaaacagagtttcactcctgttgcccaggctagagtgcaatcttgcgatctcggctcactgcaacctccacctcccaggctcaagtgattctcgtgcctcagcctcccaagtagctgggattacaggcatgtgccaccatgcgcagctaatttttgtatttttagtagagatggggtttcaccacattgcccaggctggtctcaaactcctgggctcaagcaatccatctgcctcagcctcccaaagtgctgggattacaggtgtgagccactgcaacacacgcctatgtttttaaatgttgtgctgcttcagtaaaagtgagagttgaagtaaattttttgcttaaaaatgtctttgtgtctgcgcatcgtggctcacgtctgtaatcccagcactttgtgaagaccaggcaggtaaatcacttgagcccaggagttcgagaccagtctatggcctatacattcaactatactgcaaacactgcagctattcaggggctcagacttgcaattctgggcctccctcaggacccggacaagtttcccagcacagatcctgagggtaggactgtcaataacagtctccagatacaggtttcctttgccaagaagacccttaaccatgttataaaggcattttattttattttactttattttattttattttattttatctttgaggcagggtctcactttgttgcctcggctggagtgcagtggtgcgatcgcggctcactgcagcctcaacttctccaggctgaagcaatcctcctacttcagcctcccaagtagctgggaccacaggcacgtgccacaagctaatttcatttttgtgttttttaatagagatggggttttgccctgtcgccccacccccgcccctacaagtgctggctcccccaagctgcaagaaaggtgatcacatagatcgctcaattatgtcttcccaagtgactgtgagtaacctctttacacaacttttacattaaagctcctcctgtttttgtgtgttcaacatacagacacacaaacagacaaacacttgtcttacaaaaatggatttgtactaaatacacaactttgctgtgccttctttttctttttttaagagatgagggtcttgctctgtcgtccagggtggagtgcaatggtgcaatcatagctcactgcagccttgaactcccgggctcaagtcatcctcccacttcagcctctccaggagaggggactataggtgtgcaccaccacactcagctaatattgttatttttcataaagacagagtcttcctatgttgcctaggctggtctcggactcctggcctcaggtgatcctcccacctcagcttcccaaagtgttgggattacaggcatgagccactgcacccagctgactatgcctcttttctttaaacttggccatgggctgggtatggtggctcacacctgtaatcccagtgctttgggaggctgaggtaggtagatcacttgaggtcaggtgttccagaccagcctggccaacatggtgaaaccccaactctattaaaaatttaaaaaataaaaaaataaaatagctgggcatggtggttaaaaggggtcaggtgtagtaactcatgcctgtgatcccagcactttgggaggccaaggtgggagaatcacttgagaccaggagtttgagaccagcatggacaacacagtgaaaccccatctctacaaataataaaaaattagccaggcgtgctgaggcaggaggaggatcacttgagcccaggaggttgaggctgcagtgagccatgatcacatcactgcactccaatcttatgaaagtcaaagaggattttgattaaattttatatgtgatcctgaatttgaaacttagtaaactagggtagattaacgtacttagtgggataaaaaaattatctaactggccaggcacggtggctcacacctgtaatctcagcactttgggaggccaaggcaggtggatcacttgaggccaagagttcaagaccagcctggccagcgtggtgaaaccctgtctctactaaaaatacaaaaattaaccaggcatgctggcaggtgcctgtaatcccagctactcaggaggctgaggcaggagaatagcttgagcccaggaggcagaggttgcagtgagctgagattgagccattgcactccagcttggatgacagagcgagacttcgcctcaaaaaaaaaaaaatcctaactgaaacccactgtgaacattagggacaaaatgagaatttctaccatcactgttattacttagcctaattccaaacattctctagcccacacattaagaaaaataagagacataaaatattagaaagaaacaatcaaaataattttttgcaacgtaacagcatgtttataaaacccaatagcatcaactgaaacattactaaattaataagaattcaataaagtggcaaagaatttaacacatgaaagtcaatagtaaaaaagaaaagtcaatattcttcctttcttatacaagcaataaccaattagaaaaacttagcagacagccaggtgtggtggctcacatctgtaatcccagcagttttcaaggctgaggtgggcggatcagttgaggtcaggagtttgagaccagcctggccaacaaggtgaaaccctgtctctactaaaaatacaaaaaattagctgggtatagtggcaggtgcctgtaatcccagctacccaggaggctgaggtaggagaatcacttggacctggggggcagaggttgcagtgagccaagattgtaccactgtactccagcctgggcaacatagtgagactctgtttcaaaaacaaacaaacaaacaaacaaaacctaacagagaaataatacctttcacaatagcaacaaaagtacatttctagggataaaattaatataattaagcagaaaactgttaaactttactgaagaacagatgttatttcattttctttcattgattcgaaattttttttttttttaaatgagacaagttatcattctgttttccaggatggagtgcaggggctcaatcatagctgactgcagcctcgacctcttgggctcaagcaatccacctcaacctcccaagtagctgggactaaaggtgtgagccactgtgcctggccctatttctttaaaataaaacaaaatcggccagctgctgtggctcacgcctgtaatcccaacactttgggaagccaaggagggtggatcacttgaggtcaggagttcgagaacagcctggacaacatggtgaaaccctgtctctactaaaaatataaaaattagctgggtgtggtggtgggtgcctgtaatcctaggtactcaggaggctgaagcaggagaatcgcttgaacctgggaggcagaggttgcagtgagccaagattgcgccactgcactccagcctgggcaacagagtgagactccctctctaaataaatagatacataaaataaaataaaacaaaatcacactgtgaagcttcactgattataaaacatcacacggacacacaagtcagatttgaaatggaactgccgtaattcagtctgctgaaccacttctgcagtacctgtgtttctatcaaatatggaagggaaaaaatacaacagaaagtccgtcaaacgttctcattttcatatgactgacatttgtagagtctcttttaggctaaaatgacatggttggaagcctgtgccgaatggcagttggccatgtccacaacatgtgaatattttcatttgctttaatgtggaattcagaacatgacccagttgaatccttaaaaatgcctataaaattcctaagtttctccaagagactcttcctttaaaatgcttgcattcttggccggatgcagtggctcacacctgtaatcccagcactttgggaggctgaggcgggtggatcatctgaggtcatgagttcaagaccagcctggccaacatggtgaaaccatgtctctactaataaaaattagccaggtgtggtggcacatgcctgtaatcccagctacttgggagaatgaagcaggagaaccgcttgaacccaggaggcagaggttgcagtgagctgagatcgtgccattggactccagcctgcgcaacaagagtgaaactccatctcaaaaaaaaaaatgcttacattcttgtagcacagcaccaagcaacagacaaattaaatcgtaaagaaacttctacaacagcagcaacagacatttctagacatgtggattgttttgagtcccacagaccagtggcaagtcacatctatttttgcatttatatatatacacattacacatatattttaaataaaaatagagatgcggctgggtgtggtggctcacatctataatctcagcacttttactggaggtggaagcaggaagatcacttggggccaggagagttcaagaccagcctgggcatcatagtgaggagaccccatctcttaaaaaaaaaaaaaaaaaaaaaagagagagagagatgactggccatggtggttgacgcctgtaatcccagcactttggaaggccgaggtgggcggatcacctgaggtcaggagttcgagatcagcctggccaacatggtgaaaccctgtctctactaaaaatacaaaaattagcctggcacggtggctcatgcctctaatcccagcactttgagagcctgaggcaggtgtatcatgaggtcaggagttcaagatcagcctggccaggatggtgaaaccccgtctctactaaaaatacaaaaattagccgggcgtggtagtgggtgcctgaaaccccagctactcaggaggctgaggcagagaattgcttgaacccaggaggtggaggttgcagtgagccgagatcacgccactgcactctagcctgggcaacagagcgaggcttcatctcaaaaatatatatatacacacacaaaaattagttggccatagtggtgcatgcctgtagtcccagctactcaggaggctgaggaaggagaatcgcttgaacccagaaggtggaggttgcagtgagctgagatcgcaccattgcactccagcctgggcaacagagtgagactgtgtctcaaaaaaaaaagagagagagagagagagacaaggtctcattctgttgcccaggctggtctcaaactcctggcctcaagctgtcctcttgcctcagcctcccaaagtgctaagattataggcatgagccattgcatctgggcataagtctcaggtaaaagttcaggcaggctgtggcagtgtggcataaagctgcaattcccgaattgttttcattgctttctacccagaatacaaactttccagtaaacttgagtcctgaaacattcagaataccaacttcccttctccaattccaaaataaaccccaaactcacaggatttaaacaaggcagcagtcaaaaaggcctctatttatgtcaaacaactcactgtctctgagaatgaacgtcaagtgcttccaaagtattaaccaattgcttttaaaagtagtagttggccgggagcggcggctcacacctgtaatcccagcactttgggaggccgaggcgggtggatcgagtttgagaccagcctggccaacatagtgaaaccccatctctactaaaaatacaaattagctaggcatgatggcgggtgcctgtaatcccacctactcaggaggctgaagcaggagaatcacttgaacctgggaggcggaggttgcagtgagccgagatgccgtcattgccctccagcctgggcaacaagagcgaaactccagctcaaaaaaaaaaaaaaaagaaagaaagaaagaaaaaaatagtaatagtcaaaatgtcataagatgttttcttttctaaactaaaagtagtccaagatgagccaattaagaggattatcatggaaagtaaaataagccaggcacagtggctcatgcctataatcccagcactttgggaggccaaggcaggaggactgcttgaacccaggagtttgagaccagcctgggcaacagtgggaaactctgtctttacgaaaaatacaaaaattagccaggcatggtggctcacgcctgtaatcccagcactttggaaggccaagacaggtggatcacctgtggtcaggagttcgagacccacctgaccaacatggagaaaccccgtctctgctaaaaatacataattagccaggcatggtggcacatgcctgtaatcccagctactcgtaaggctgaggcaggagaatcgcttgaacctgggaggtgaaggttgcggtgagccgagatcacgccattgcactctagcctgggcaacgagagctaaattccatctcaataaaaaagaaagaaagaaagaaaaatgcaacaattagccaggcacggtggcacacgcctatagtaccagctactcaggaggctgaagtgggaggatcacctgagcccaggaggcaggggttgcagtgagccgagatcatgccactgcatgccagcctgggtgaaaaagtgagactctgtctcaaaataataaagaaaaagaaaaaaaaaaagaacgtaaaatatttcttcaaagcaattttcatgatactaggattaattcctataaccaatgcctgggctgcatggcgcaaacttgggccaccctgcacctcatcccctttcccctccttgatggaatttggaggtgactggttaaaaactcaaactgatggagttgaagagggaaggaagaggagggtattccaggcacaggacggtctcccagccccagcatcggggcatggtctctcctgtgttctccactgaagcacctcttccacttcccacttgaaacccccactgacccaaaggccccgcaggcagggcttgtggcatctctggcacccagcacagtgccaggcacaggtgggcttatgaggatctgcaaatgggagaggagtccagatacccaggaatgtggctgggggacacacaagcaaagactctggttattcaaatatttaaggggagtgaattgacatctttgatttcctttgaaattgcattacaaataagacagactgataatagccattactttcgttctcttttttttttttttttgagacacagtttcactgctgcccaggctggagtgcagtggcacaatctcagctcactgcatcctctgcctcctgggttcaagcgactctctcgtgcctcagcctctcgagtaactaggattacaggcatatgccactatgcccagctaatttttttttttttttttgaaatgggatctcactctgtcgcccaggctggagggcagtggcgtgatctcggctccctgcaacctccacctccaccttccaggttcgaacgactcacctgcctcagcctcccaagtaactgggattacaggtgtgcaccaccacgtccagctaatttctgtacatttagtagagacaggggttttaccattttagccaggctggtcttcaactcctgagctcaagtgatccgcctgcttcagcctcccaaagtgctgggattacaggcgtgagccactgtgcccggcctttagccattactttcaatggaaaaactgcaattaccttcaaaccaacctaacagacacaagaatgcgcagatggacaaatatgtcaggaagcaatgctggcagtatgttcttggaagaattgagtacacaggagtttgctataaaattcttaaaattttttgaaaagtttggaaattttcataataaaatgttagagaaaaaactttagctattcttctaaagacataacctaaactggttatatgatttaagaaaaaaatacactattaataaaagaggatataagttttaaatttcaaagcatgtccactacagaccctctttgacttggcctcttgggaaaggccctcctgggtttccaacctgccttgtccaagacccaggaggagcttcagaagccatcaaaggcaacaacaaaaatatggcaggaataaacatataaattatgcatgtagctggctgagaagggcctcagggtcactctgtagatatcaactgactctgcctgttgagcctaaggccattgcaagggatacatattttctctatctccattttttttcttttttttggagacagggtctcattctgttgcccagcctggagtgcagttgtatgatcacaactcactgcagcctccagttcctgggctcaagcgatcctcttgcctcagcctcccaagtaactgggactacaggcatgcgccactgcaaatggcctatttccattttaaacactgagtctggtgcccatggctttgagatttaccttgaggacgactgcaaagtcgacgtctttcgtttccttcaggccaagaggaatcaggggaatcgtaaatgcctccctatgaggaacacaacaaggtatgtatgaacacccccaaccggacccctgtgcaccccacggccttgccctcagcagcccaagctcaggtgtgtgccccctccttaccccatcctgtactcacctggctgacaggctcattttccataaggatgactctggtcatgccccaccctctgctctaaaactgaccccgctccctaagactgctggaccacccctcctaacacatcaggcccctggcatcttgacactgatttatcttccagtttcaatgcctcaatggttccttttttattttattattattttttttagagactcttgttctgtcgcccaggctggagtgcaatggcgcaatctcagctcactgtagcctctgcctctcgggttcaagcaattctcctgcctcagccccccgagtaactgggattacaggcacacgacaccacacccagctaatttttgtatatttttttagtagcaatggggtttcgccatgttgaccacgttggctaggctggtcttctgacctcaagcgatccgcccaccttggcctcccaatgtgctgggatgacgggcgtgagcctctgagcccagctcagtctcaatgcttctttcggcagctgtgctgagagtctattgtgtgccagggtctgtgcctggtgcacttgctgctcccacctgggtgcaccaccctgctgcctcctttgtcagctcctcacccccacctcctctgcccccctcagcgggccccacagctgtggaagctctccaataccctcacatttgcaactctgggttcataggggcctcttctttgggaagtgtctaggcgtcccaccaccggcacaggagatgccgtcagggcagaagccccatctgacaccgaaatgcacctgcctcccagcccagggtcagacaccctccacctcctctcccccagctgaccactccgtaaccacaggtcgcctggggagtgctccctgagcctacattcctaggggcagggccagaaggaagtgaatgaagctcaggctgtgttttgcaaacaaggatttagctccctgacctgtaacaggagacctccttgggctgctcagcccagccccacaagaaggccaggaaggctgggcagggcgaggggacaatgcagctgtaagctgaacctggctctgcagtgcagctgtgctacagccaggtgagtcccatccgggggcatggaaagccggatcctgctgaaggctcctccaggctactcagggcaggaagccaggtttgcagctgtccaggcaatgagaagaggaggagcgagtgtcctgagtcccagctccagggtaccccagccccaatgtggcaatgacagcgccctctaggtgccttctggcctccctgagttttcccatctgcaccatgaggttatttctttcccacctacctcctagaagactgtaaagatcaaccatgctaagaaagaaacagtctactttgaaaacacagtagtgcaggccaggtgcagtggctcacgcccataatcccatcactttaggaggctgaaatgggtagatcacctgaggtcaggagttcaagaccagcctggccaacatggtaaaaccccgtctctactaaaaatacaaaaactacctgggcatggtgatgtgtgcctgtaatcccagctactcaggaggctgaggcaggagaatcacttcaaccaggaggtggaggtagcagtgagccaagatcacgccactgcactccaggcctgggcaaaagagcgagactccatctcaggaaaaaaaaaaaaaaagaaaaaaaaaagatcaaccatgctaagaaagaaacaatctactttgaaaacagggccaggcatggtggctcacacctgtaatcccagctctttgggaggccgaggcaggcggatcacgaggtcaggagatcgagaccatcctggctaacggtgaaaccccgtctctactaaaaatacaaaaaattagccaggcaaggtggcgggcgcctttagtcccagctactcgggaggctgaggcaggagaatggtgtgaacccgggaggcagagcttgcagtgagccgagatcgtgccactgcactccagcctgggcgacacagtgagactccatctcaaaaaaaaaaaaaaagaaaaaaaagaaaacagaagagcgcaggacccaaatgcatggtgccgtgttgaatctgcacagctctccctcttcccaatgacacagggcagtgactggccactctagagcccagggaccaatccagagaccttcggttcactctgtgggaagccctgtgttgcacgtccctgctcttcggcatggcaaatgcgagtgtggaacagccgacatttattcccaaaccttggccccatctcgcctcctccagaacctgaaccttttggacaaacactggaattgaacaccagagcataggctgggagaaccttccattagctgtcgcactgactgggcgttcaaaactgcacaggaggccgggtgtggtggctcatgactaatcccagcactttgggaggctgaggtgggtggatcacgaggtcaggagttcgagaccagcctggccaacatggtgaaaccccgtctctactaaaaatacaaaaaattagctgggcatggtggcatgcgcctgtagtcccagctactcaggaggctgaggcaggaggattgcttgaacctgggaggcggaggttgcggtgagccgagatcatgccactacactccagcctgggtgacagagagagactccatctcaaaaaaagataaaacaaacaaacaataaaaaccgtacaggagcccacaggtaagccaggcatgtggtgtcacaaagggaagagccagcgaggtttcacacactgacgcctcccctccagctctgaaaccaccccggtgccctgcagaggaccagcaccaggaaacacacattccataggtgactcaaggttcccaaatcccgggagctattttccgactgagtttcccctggggcccacctactttttgagaagtctcatgcccacactgaagaagcacgtaaacccttctctgaactgtctcaaagttatttctccttaaaaagaagcatttcgcttagggttctgttttgtttttgtgttttttgagacaggacttttttctgttgccattactacagtctcgacctccctggctcaagtgatcttcccacctcagccttctgagtagctgagactacaggtgtgcaccaccatgcccggctaattttcctattttttgtagagatggggtttcactatgttgcccaggctggccttgaactcctgggctcaagcgatcccccacctcagcctcctgaagagccgggattacaggcataaggcaagaggggcatttctttcatagttagatctccatttttggagatgtattgcaattctgagggatggtgttgttggctttcacgttgaagaaatcgattccaaaattgagttatggagaatgatacaatagagtgccttcaaaattgacctaggggccaggcacagtggctcacatctgtaatcccagcactttgggaggccaaggcgggcagattacttgagaccaggagttcaagaccaacctgggcaacatgatgaaaccctgtctctacttaaaaaaaaaaaaaaaaaacaattagccaagtgtgatggtgcgtgcctgtaatcccagctactcaggtggctgaggcacaagaatcgcttgaacccaggaggtggagattgcagtgagctgagatcgctccactgcactccaacctgggtaagagagggagactctgtgtcaaaaaaaaaaaaggaaatacaaccttaaaaggagactggtgtgttactttaatttggatttttctgtttcagtttgtccctccagctaggaaacagactgcagtccaacgtaagtacagtgcacagaatctctgtgtgtgcatagtggcctccccttacagggtcaattttggcctttggccttaatcccaaagtatttgtgtatgctttttgttccttggcaaataaatgaggaaataattagccaacattggaaaggtattgtcctaacaatgtccctttaatatttcttaggaaagttatggtgacccactaaaatatccttgcttaatgtctgttcagttgaatttaataacatatcttgctaatgtttgcgtgtctatgaaatgtgactacgcggaattactgaaaattaactataaaatccaaggcatctaacttttaaacttatcttggctcatcacgtatatttacactagattttatactgtgttcatttgtttttttttttttttgtctgtttgttttgagacagagtcttgctctgtcagccgggctggagtacagtagtgtgatctcggctcactgaaacgtccaactcccgggttcaagcaattctgcctcagcctctgagaagccaggattacaagtgtgcaccaccacgcctggctatttttttttttatttttagcagagacggggtttcaccatgttggccagactgacctcaggtgatccacccgcctcagcctcccaaagtgttgggattacgggagtgagccaccgtgcccggcctcacaaatgcctttttgtccaacactgcaggtatttcccaacaaatgggctcatcccttccagtctagcacctcactcaaccccaaacctgatggttctctcacttccgaaagtgggggctgccacaccccagtctagaacgctatctgacctctttgtgcagcaccctggatgtacgaaggatctctggctcagaggcttttggaaggtgtgctgctcccacttactctgtgttctgatagacgcccaccgagatgttcagcccctccagctcttccttgagcatctgcaggtctgagttgacgaagctcagctccagccgcacttgctcccgcacctttgagtttgtggccactctgttcaaagagaagagggagagaagtgccctcagccaggtatcctggcttctaggtgagcagacccaatccccagtccctgcagggaggatcagggcacagcttgcagaggagggccaggagtgtcggttaaggtatcccagggacacagggcacctacccagcttgcagcacacctgccagtacgtggagctggggacacaggcaatgacactgtgagctgcagacatgaactctatgacatcctgcaaacactcagtcttgagaagagaaaacaaaactgctcccagccatgccctaaaataccataagatacccacttgaaaagaaatgaatgattccagccgggcatggtggcttacgtctgtaatcccagcactctgggaggccgaggcaggtggatcagctgaggtcaggagttcgagaccagcctggccaacatatagtgaaactctgtctctactaaaaaatacaaaaactagctgggtgtggtggtgcatgcctgtagtcccagctatgcagaaggctgaggcttgaacctgggagataggggttgcagtgagctgagattatgccactgcactccagcctggacaacagagcaaggctccctctcaaaaaaaaaaaaaaaaaaaaaaagaaatgaatgattcctttcggtgggagaaatcacagtacataaataaataaacataaaatttgttttaaaaaaagaaagaaatggatgattatagctgggcatggtggtgcatgcctatagtcccaggcaggaggattgcttgagtccaggaggttgatactgcagtgagctatgatcacaccaccgcaatccagcctgggtgacagagcaagacactgtctctaaaagctaaaataagataaaatgaaataaaatataaaaatatataagatagaaagtaaaataaaataaatgaatgagaaaatgaagggagaggtaatgcttcccaattcattctgtaagactagtattagcaatccaagcctagcaacatataaataggattgtacaccataactaagtgggatttatcccaggaatgcaaggttggtttaacatctgaacatcaatataatataatatattaacagaataaaggacaaaaaaacacatggtgacttcaacagatattgaaaacactgtgacaaaatccatcacagattcataataaaaattctcaacaaagtaggaataaaagagaatttatgaaatctgataaaagacacctacaaaaacccacagttaacatcacacttagtggtgaatgactgctttcctcttctcaccaggaacaaggcaaagatgcccacttttgctatttctaatcaatgaggcaaataaagaaattaaaggcatccagattagaaaggaagaaataaaactgtctttatttacagatggcactatcttatatatagaaaatcctaaggcatccataaaacaaatattagtactaataaatttagcaaggtcacagggcataatcaatatacaaaaatcaattctttttttttttttttctctagacagggtatcagtctgtcacctaggctggagtgcaatgtcaccattatggcttactacagcctcaacctcccaggctgaagccatcctccagcctcagcctcccaaggagctgggactacaagtgcacaccaccacgctggctaatttttgtgtttctttgtagagatggagtctcactatgttgcccaggctggcccagaaatcctgggctcaagcaatcttcctgcctcagcctccgaaagtgctgagattacaggcatgagccactgtgcctggccaattctatttctatatactagcaatgaacaatcttaaaattgagaaaaccattccattcacaatagcatcaaaaagaataaaatactcaggaataaacaaaagaatcacaagacatgtaaactgaaaactacaaaacaatgctgagatatattaaaagaagagctattctatgtttatggatgggaaggctcattattgtcaagatatcaagcctccttagttggtacattcattcaatgcaacctcaatcaaaatcccactaacctttttaatagaaatcggcaagctgatcctaaaattcatatggaaatgcaaaaaaaacctacaataggcaaaataattttgaaaaataagaacagagttggaagacaattgattttaaaatttactaaaaagctgggctgggcatggtggctcacgtctgtaatcctagcattttgggaggttgaggtgggtagatcacctgaggtcaggagttcaagaccagcctggtcaacacggtgaaaccccatctctactaaaaatacaaaaaattagctgggagtggtggcggacacctataatcccagctactcgggagcctgatgcaggagaatcacttgaacccggaaggcagaggttgcagtgagccaagatcgcgccaccgcactccagcctgggcaacaagagcaaaactccatccccaaaaaaaaaattaaaaataaacttactaagaagccatagtcatcaagatagcatggtactgacataaagataggcaatgaatcagaataaaagtccaggaataggccgggtgtggtagctcacgcctgtaatcccagcactttgggaggccgagacggacggatcacgaggtcaggagatcgagaccatcctggctgacatagtgaaaccctgtctctactaaaaatgcaaaaaattagctgggcatggtggtgggcacctgtagtcccagctactcggggggctgaggcaggagaatggcgtgaacccaggaggcggagcttgcagtgagctgagatagcaccactgcactccagcctgggcgacagagcgagactctatctcagaaaaaaaaaaaaaaaaaagaagaagagtccaggaataaatgtttacatttatgtagtaaatctttacaattgattttgaacaaaagtgccaaatcaattcaatgtggaaaagattattgtttcaacaaatagcgctaaagcaggttgacatccataggtacgtcagggtccctaaaaccacccccaagttcagtgttaatctaggaggacttgcaaaagccatggctatggtttacgacagcaaaagacacaaagcataatgagcaaagggaaaggcacatggggtgaaattgggaggaggcccggcccaggcttctaggggtcctctcccagtggaatcccacagaccgtgcttaactcccccagcaaagagttgtgacaacacacgtaaaatgccatctaccagggaagctcagagactccgtgtccagggtttttactgggggctgatagcataggcacctctgcctagcatgctccaaaattctggattcccagaaggaaggcaagtggttccacataaaccacaccatttgtacaaacagttcaggcacagtgagtcaatcttatcagtctgggaatggtgagaacactcgtaaaatcgaagtctctgccctcaccacgtgtgacaacactcttcctcttgtggccctggaagtccacacacacgcacatttggactgccccagaaaataagatactggaggctcagcttgatgaatttcatcaatttagagatgtttgtgtgtgtatggctatggcaccagtaagaaatacattttaagccaggtgcagtggctcacatctgtaatcccagcactttgggaggccgaggcacgcggatcacttgaggccaagaattcgagatcagtctgggccacatggtaaaaccccgtctctattaaaaagacaaaaattagccaggcatagtggcacacgcctgtagtcccagctactcaggaggctgaggtatgagaatcgcttgaacccgggaggtggaggttgcagtgagctgagagcgcaccactgcacaccagcctgggtgacagagcaagactccatcacaaaaaaaagaaaaaagaaatacattttattttacaactcagtacatgcatgcacacacacagacacatgcccctgcaacaaaagtctcacagaagtcataggcgtgatccactccagcatagtctagtctactctaataacttctttttaaaacacaattatgtttgcaaccctccaattctctgattatctgacaccaactgggtatccaacaattcaattcgattctgaccccagctcccggcgtaagcacataccccacagagtaggggctcggtcccacaaggctgcccccattttagggaccagtcacacatcctgggagagagggggatacttgtgcttctgactgatgagctgtcaatcaaaggttcccactgccacctcctcaggtttggtaattcaccagaaagactcccagaacataggaaagcacctgatggaccagtactggtttatgttattcaattcaggaacagccaattggaagaggtgtacacggcaagttatggtgggagaggggcagggcttccatgctcactccagacacctcaatgtgttcaccaacccagaagctccctgaacctcatcgttcagaattttattctattctattctttctattctattctattctattctattctattctattctattctactctattctattctattatttttgggagagggtcttgttttgtcacccaggctggagtgcagtggcacatcatggcttactgcagccttgccctccagggctcaaatgatcctcccacctcagactcccaagtagctgggactacaggcatgcaccaccacacccggctaatttttgtattttttcaccatgttgcccagtccagtctccaactcctgggctcaagcaatccgcctgcctcaggcttccaaagtgctgggattacaggcgtgagccacgacgcccagccttattttatttttttgtatagatggtgtcttgctatattcccgaggctggtctccaactcctgggctcctgggcttgagtgatcctccctcaccctcctgagtagctggaactacagatatgcaccattgcgcctggctaacgtaggttttttgtgggtgtgtgtgagatggagtcgcccaggctggagtgcagtggcgtgatcttggctcactgcatgctctgcctcacgggttccagtgattctcctgcctcagcctcccgagtagctgggacagtgattctcctgcctcagcctcctgagtagctgggactacaggcgcccgccaccacgcccggctaatttattggatttttagtagagaggggtttcaccatgttagccaggatggtcttgatctcctgacctcgtgatccacctgtctcagcctcccaaagtgctgggattacaggcgtgagccaccgggccggtcttttttttttttttttttttttgaggcagagtctcactctttcccccgggctggaatgcagtggtgcgatctcagctcactgcaacctccacctcccaggttcaagcaattctcctgcctcaggctcccgagtagctgggattacaggagcctgtcaccatacccagctaatttttgtatttttagtagagacggggtttcaccatgttggcctggtctccacctcctgacctcaggtgatccacccacctcggcctcccgaagtgctgggattataggcgtgagccaccgtgaccagcctaatgcagggtttatggaggcttcattacgtatagatgattaaatcattggccactggtgactgagctcgatctccagcctctctcccttctccagaggtggtgtagggaggagctgaaatttccagccctctcaccatggcttgtgctttctggggatcagcatccattctaaagcctcccaccaagagtgatctcattagcatacaaaagatacttttatcactcaggagctctgtgccaggaacacaggaacaggacaaagaccaaatatttatcttttattatgccacagcaaagcactgaattgatgtcattacacaccacaggtcacaatctgcagcttgtaaaacctgtgctacaaagagcttattgagaaaacgactgatcctgtagctgataatgttcacaaggattggggtgggggcggaatcctcccatccctcagtatcaggaatgggttcatttcttcttacaaatgggattccttttgtctagtgaatataaaatgtgttccaaatatattcccttcctcctattgcctgccaggaagctcagagacaaaccatggctcacatttcacaaagtatagaggactttgtggcatgcactagccttacctccagctaaatctctcctttattcttctttctcttgccttcatatcttcattcactcctgatttaatcttacatgttgtatgaatatgttaaggtacttcaaatctactttaaaatgagggaagataaataattataattcaattataattcctagaggacaagccttctttctcttggtatttttttcctagaatctggcatagccctttccacatcatgggggcgctgaacaaattttagttcatggaagaacaaatgacagagtgaagactactccctctaggcagtgagggagctgattggtgcttagtaccacagtaggttcgacttaaatataaaaactaaggctgggcacagaggttcacacctgtaatcccagcactctgggaggccaaggtggacaggtcaactgaggtcaggaattcaagatcagcccggccaacatggtgaaaccccatctctactaaaaatacaaaaattatctgggcatgggggcacacgcctgtactctcagctactcgggaggctgaggcaggagaatcacttgaacctgggaagcgaagattgcagtgagcagtgatcacgccactgcactccagcctggcgacagagcgagtctccatctcaaaaaaaataaaaattaaaataggccgggcacagtggctcacacgtataatactagcactttgggaggccgaggtgggcaaatcacctgaggtcaggagttggagaccagcctgaccaacgtggagaaatctcgtctctactgaaaatacaaaattagccgggcatggtggcaggcacttgtaatcccactacttggaaggctgaggcaggagactcgcttgaacccgggaggcacaggttgcggtgagccgagatcgcgccattgcactccagcctgggcaacaagagcgaaactccgtctcaaaaaagaaaaaataaaataaaataaaaataaataaaaactgagaccctaagaaccccaccaaaatccctagagagcttccacgtaatgccaactctttatttttccacctttatatataaatttgccatgtctcccccctcccatcttggcaaaacatttttttttttaatagagtcaggggtctaaacatattgcccaggctggtctcaaactgctaagacaaagcaatcctcttgcctcatcctcccaaagtgctaggattataggtgtgagccatcgcgcccggcctggcaacaatttttgatttaagatttgccacaaggccaggcgcggtggctcacgcctgtaaccccagcactttgggaggccaaggtgggcggatcacgaggtctggagtttgagaccagactggccaacacagtgaaaccccgtctctactaaaaatacaaaagttggccgggcgcggtggctcatgcctataatcccagcactttgggaggccgaggtgggcagatcacgaggtcaggagatcaagaccatcctggctaacacagtgaaaccctgtctctactaaaaatacaaaaaaattagctgtgtgtggtggtgggcgcctatagtcccaactactcgggaggctgaggcagaagaatggcgtgaacctgggaggcagagcttacagtgaacagagatcctgctactgcactccaggctgggtgacagagcgagactccgtctcaaaaaaaaaaaaaaaaaatacaaaagttagctgggcatggtggcacacccctgtagtcccagctactcaggaggctgaggcaggagaatcgcttgaacctgggaggcggaggctgtggtgagccaagatcatcacaccactgcactccagcttgggcaatagagcaagactccatctcaaaaaaaaaaaaaaaaaaaaagatttacaagaaagccaggtgaagtgggtcattcctatgatcctagtgctttgagaggctgaggcaggaggactgcttgaggctaggagttcaagaccagccgaagcaacatagtgagaccctgtctctaaaacaaatatgttttttattttagtttttatttttgagatggagtatttttgagatggagtcttgctctgtcacccacgctggagtgcagtggtacgatcttggctcactgcaacctccaccttcaggttcaagtgattctcctgcctcagcctcccaagtagctggagttacagtgtgtgccaccacacccagctaattttttgtatttttactagagatggggtttcaccctgtaggccaggctagtcttgaactcctgacctcaagtgatccacctgcctctgcctcccaaagtgctgggattacaggcgtgagccaccacacccagccaatttttgtatttttagtaaagacaaggtgtcaccatgttgcccaggctggttttaaactcctggcctcaagtgattcttgaggatcagcctcccaaagtgctgggattacaggcttgagccaccacacctggcctaaaaattttttttaaatacatttccaacaaatcaatgagctgcccttaagatgtagacctctttaggttggtcactttgaaactgttggcagccaggtggggtctcagggttggtttctgtaatgctgacctttggtgcaaccatgattcagaaatcaaccctggcgtctgagcttcgttgctagcacaggtgtaggtcagaggcgttcgaaggacagcgactccattttgagtgagggctggaaaaagaggctgagacttgctgggctgcattctcagaaaattagccattcctagcctctaaatgtttacagtaaagggaacaaattaataatgttttctaaaacagacccagacctgggagtgtccagatatcccgatatctggagaacaaaggcattcctcaattttgctttaaagataataatatcgggccgggcgccatggctcacgcctataatcccagcactttgggaggccgaggtgggcagaccaccaggtcaggagatatagaccatcctggctaacacggtgaaaacctatctctactaaaaatacaaaaaaattagctgtgtgtggtggtgggcacctgtagtcccagctactcggcaagctgaggcaggagaatggcatgaacccgggaggcagagcttgcagtgagcagagatcaggccactgcactccagcctgggtgaaagagccagactccatctcaaaaaaaaaaaaattaaaaaaaaagataataatatcgattcctgcaaaatatagtaagaaagaaaattaatttttttttttttttttggtgacgggagtcttgctgtgttgcccaggctggagtgcagtggcacaatcttgggaggctgaggcaggaggattacttgaggccaggagttcaacaccagcctgggcaatatagggagacccccatctctacagaaaatttgaaaatgaaaattagctgggaatggtggtatacgtgtatagtcccagctgcttaggaggctaaggcaggaggatcacttgagcccaggagtttgggtctgcagtgggctagtgagaggtgacagcgtgctggcagtcctcacagccctcgcttgctcttgatgcctcctctgcctgggctcccactttggcgacacttgaggagcccttcagcccgccgctgcactgtgggagcccctttctgggctggccaaggcccgagccggctccctcagcttctggggaagtgtggagggagaggcgcgggcgggaaccagggctgcccgcggtgcttgcgggctagcgcgagttccaggtgggcgtgggctggacgggccccgcactaggagccgacgtccggcccgctggccccgggcagtgaggggcttagcacctgggccagcagctgctgtgctcaatttctcgcctggccttagctgccttcccgtggggcagggctcagcacctgtagcccgccatgcctgagcccccccgccaccctctgtgggctcctgtgtagcccgagcctccccgacgagcgccgccccctgctccacggcacccagtcctatcgaccgaccacccaagggctgacgagtgcgggcgcagggcgccggactggcaggcagctccacctgcggccctggtgtgggatccactgggtgaagccagctgggctcctgagtctggtggggacgtggagaacctttatgtctagctaagggattgtaaatacaccgatcggcactctgtatctagctcaaggtttgtaaacacaccaatcagcaccctgtgtctagctcagggtttgtgaatgcaccaatcaacactgtatctagctactctggtggtgacttggagaacctttgtgttgacaatctgtatctagctcatctggtggggacatggagaacctttgtgtctagctcagggactgtaaatgcaccaatcagcaccctgtcaaaacagaccactgggctctaccaatcagcaggatgtgggtggggccagttaagagaataaaagcaggctgcctgagccagcagtagcaacctgctctggtccctttccacactgtggaagctttgttctttcactctttgcaataaatcttgctgctgctcactctttgggtccacactgcctttatgagctgtaacactcactgcgaaggtctgcagcttcactcctgaagccagcgagaccacaaacccaccgggaggaaggaacaactccagacgaacaactccagacgtgccgccttaagagctgtaacactcaccgcagaggtctgcagcttcgctcctgagccagcgagaccacaaacccaccagaaggaagaaactccaaacacatccgaacatcagagggaacaaactccagacacgctgcatttaagcactgtaacaccgcgagggtccgtcgcttcattcttgaagtcagtgagaccaagaacccaccaattccggacacactaggattgcactgctacactcagtgtgggcaacagagtgagacctcctctcaaaaaataaataaataggcatggtggctcacagctgtcatcgcagcactctgggaggcctaggcacgaggattgcttgagccctggagtttgagaccagcctgagcatcatagggagacccagtctctacaaaaaaatttttaaaattagccgaatgccagtcaggtgtggtggctcatgtctgtaatcccagcacttttggaggccgagtgggcggatcacttgaggtcaggagtttgagaacagcctggacaacatggtgaaccccctctctattaaaaatacaaaaattagctgggcatgggggtgcgtgcctgtaatctcagctactagggaggctgaggcaggagaatcgcttgaacccaggaggcaacagagcgagactccatctcaaaaaaaaaaaaaaattagcctactatggtggtacacacctgtggaggctgaggcgggaggacagcttgagcccagaaggttgaggctgcagtgagctgtgatcataccactgaactccaggttgggcaacacagcaagacccagcctcaaaatgaataaatataaaaattttatttatttattatttatgtatttatttattttgagacggagtctcgctctgtcacccaggctggagtgcaatggcatgattgcagctcattacaacctccgtccccctggttcaagcaattctcctgcctcagcctcccaagtagctgggattacaggcgcacaccaccacacccagctaattttcttttctttttgttaagagacagggtctcactctgtcacccaggctggagtgcaatggcgcgatctcggctcactgcaacctcgaactcctgggctcaggggattctccagcctcagcctcccgagtagctgggattacagatgtgtgccaccacgcgtggctaatttttgtatttttagtagagacaaggtttaaccatgttggccaggctggcctcaaactcctgacctcaaatgatttgcccgcttcagcctcccaaagtgctgtgattacagacttgagccaccacgcctggtctaaaaagttttttttttaaagtaatacatgtgtatgttgcattctgtccccatttgttttagtgtaattatttttctcccaagtcttttaataaaactatccttccaggaataagcaccacattgacatagtgacttgccgcagcttcagcgaccttattagagcagcttagccttagtccatctgatcccaaatcccgctctgccagggtttcaggaggctggagcgaggactgtcccatcccctgctgaggtggctgatcagccagaccggcaggacatctgctcccagcctgtctctcaatggaggaaggtgggccttgatgttgatgtcagccccaaaggctatggagggcctgcaaaccccaccacagacacacaccagccctcccacaactgacggtgtgagctgtcatcaacctcaagtcactctcatgacagccaaggccacctcacgtcactcctgacccagaatttcatcacccccgtccagaggtcacaaactaaactgaaggcccgagggacttgttcacctggctctcaggatgttactatcccccctctgaaacgagtccccaaaacttaaaaattcaacaatcggccaggcacagtgggtcatgcctgtaatcccagcactttgggaggctgaggcagacagatcacttgaggtcaggagtttgagatcagcttggccaacatggcaaaacctcgtctctactaaaaatacaaaaattagccgggtatgatggcgcatgcttgtagtcccagctactcaggaggctgaggcaggagaatcacatgaacctgggaggcagaggttgcagtgagctaagatcacgccactgcactccagcctgggtgacagagcaagactctgtctcaaaaagaaaaaaaaaaaaaattcaacaatcagattaaaaacaaaaaaaaattcctaacttctcctggaaaaaaaaaaaattagaagatacagcaactctggccctaccctccatgaggcaaactgcagttgcctcatccagacagggcatatgctgtgcacttcaccacagtccccaccactccctgttgtctcacagcacagaatccagccccattcactcatttaaagcccacctgatccctgtaaacctcggagcaggtcacttctgatctagcccaacaactctcagcacaacaggggaacctgaagcccagagaggttaaatgacctgctcttgttcaaagaatcaaagaactagttagctaaaactagttaaaactaggcaacctgcctttttttttttttttttttttttgagacggagtcttgctctgtggccctggctggagtgcagtagcgcgatctcagctcactgcaagcactgcctcccaggttcacgccattctcctgcctcagcctcccgagtagctgggattacgggcacgtgccaccacacccggctaatttttttatttttagttttagagatggggtttcaccatgttggccaggatggtctcgatctcttgaccttgtgattcgcccacctcggcctcccaaaatgctggaattacagaagtgagccacagtgctcaccggccctgctttaaatttcacaaggactgcctcaatttcagataaacttcatcatatttctaccctagcttttctcaagggagggaagctgggagaagacagaatattgtctctggttggcctaaatgaaaaagtacggtcaggcatggtggcttacacctgtaattccagcactttgggaggctgaggcaggcagatcacctgaggtcaggagttccagaccagcctggccaacaccgtgaaaccctgtcttactaaaagtataaaatttagccaggcatggtggcacatgcctataatcccagctactcgggaggctgaggcacaagaatcacttgaatccaggaggtggaggttgcgcaggtgagctggtatctcgacactgcactccatcctgggagacagaatgagactctgtctcaaaaaaaacaaacaaacctgaaaaaagtgcatttgaaatatttgatggcttcctaaaaaaactccaggaagctcatggactcccagctggaatggatcagagaaggggaagactttgaaggatcataaaatctggtttttcaagtgcctgcctagccacgataccctctgacagtcctcagataagggcttagcacccccatttccattcctgcatttctggggacacctccaaacatcccccacccctattccaacagatctactttcctttgggggctgcggtaggaaacctgggaaccagaagacaaacagaaggaaagcagggcctaatttacaactgaaaccacccatggcctgcagagacagccacgtaatgggtcgcccagggacactgaggggccagagcggagcttggcaaaatgccctatttgttttcgggaaaccgttggtgcttgttgagtcagattaataaataccttcagggtttcctctgacaacattctccagcaaggggtactttgaacctttaggccactgtgagaatcattaacaaccccccactcctgcccctgccaacccaaccactgccagtttaacaatgagcttgagtcaggctcgggcctcagaaagggtgactgctgttgtcgttaagagaacaaggcacacaaaactgccctagttcctgcctgagaaagtccaagttccctgctcacaggggcctctctgaccaccctctgtctctaaggctggccatcctgggccaacctctatgatattcagagttcattattccctagaaaacatcacttccctaggtgatctgatttgtttacttgtctataaaagtctcctcccatcctccaacaagagaaatcacaaaagcagagcctcgcctgatcttcaggcacctcaactgtgcctgccacttaacaggtgctcaatagccaggcacaggggctcactcctgaaatcccagcactctgggaggctgaggcaggaggatcacttgaggccaagactttgagacaagcctgtgcaacacggtgaaaccctgtctctactaaaactttaaaaaattcaattagccaggtgtgctggcacgtgcctgtagtcccagctatttgggaggctgaggcaggagaaccacttgaacatgggaggcagaggttgcagtgagccaagattgagccattgcattccagcctgggcaacaagagtgaaactccatctcaaaaaaaaaaaaaaggtgctcaatgaatccatgaataggtaaatcaattgttgtccactcctaggaaagccatacaccatcaaggctgcccacctgcccccttggccacagagcaggcctgtccaagggtcaaccagaaccctaggccacaaaacataccacggccttcccagcacatgacagggagtcccaaaatcgggggcctctctcacgtcacacagatgacatgagttgctctctgctatgggagtggacaattcccatgtccaaacttgtcttgggatagggacactgcttgactttttaaaagccaaaacgctacagtatttttcccagcctcctccagtaacaacctgctttgcacccagttgcaaaaggagctggagaagagattcccagacaaacttcccacccaggacctcaagtcatcaggtattccgtgagtaacaaaagcaacacaggccaggcacagtggctcatgtttgtaatcccagcactctgggagaccaaggcaggaggatcacttgaggacaacagttcgagaacaacctgggcaacacagcaagaccctgtctctacaaataatttttaaaaaatcagtcgggcattggccaggcacagtggctcacgcctgtaatcccagcactttgggaggctgaggcgggtggatcacgaggtcaggagttcgagaccagcctggccaagttggtgaaacctcgtctctactaaaaatacaaaaatgagccgggcacggtggcgggcacctgtaatcccagctactgaggaggctgaggcaggagaatcacttgaacctgggaagcagaagttgcagtgagccaagatcacgccactgcactctagcctgggtgacagagcaagactccgtctcaaaaaaaaaaaaaattagtcgggcatggtggtgcatgcctgtggtcccagctactcagtaggctgttaggaggattgcttgaagagcccaggaggttgggggctacagtgagctgtgattgcacattgcactccagcctgggcaacaagagcgaaactccatctgaaaaaaaagaaaaaaggtggcatgacgccagacgcagtagctcgcgcctgtaattccagcactttgcgaggtggaggcagacggatcacttgaggccaggcgttcaagaccaggctggccaacatggtgaaaccccgtctctactaaaaagacaaaaaattagccaagcatggtggtgcatgcctgtggtcccagctactggggaggctgaggcaggagaatcacttgaacccaggagacacaggttgcagtgagccgagatcacgccactgcactctagcctgggcgacagagcaagactgtctccaaacaaacaaaaaacaaggcggcacggggctaaccatggtctccagtagaactctgaaggaagaagaaactctgcactctttgtaaacagagtgctggcacattgtcttttgttgcatttcgttgcctggagagggtttatagaggtctagacacaggtaaggcttctctgagttctatgctgggtaagtaactgttttaccacgagagcatactaatgagtgccctagatcacgggggtgtactgagccctctcattagcaaggtggacactggcaatagaaatatcccctctccttcctttctgcttttctttcctttatatattcaataaacatttaccaagcaaattctgcaccaggcatagtgtcaggcagtggagaaaatagacaagtcccagagaaagccagaaaacaaacctcgagacaaaaattgggcttcccatcaagatggctgactgaattgaagccaaatgccacaccgtctgcatctatctcccacccacccaatccccaaacacacaaacaggcggggtaaaatatctgttttcaacataaccaagctataggcaagaaagggacgactccagatgccagaaatgaggaggaaacccaaagctgaaaccaagagcctggcctgggagtttagggaacagatgactaggactcaggagaggcagggaagccagaagacacctacttcagaaggttttccgctccggtcctcatccgcacggctttcaggatctgctgattcaaagcagctctttgattctgcaatttactccggccggtttgtgcaaggggattacagccctgaggaaaaataagagatgccccttcagaggtcggccactctaaaaatgatgacagggtttaatataatggaaaatgtttaactttaaaaataatcttttctgaaaacaaagcatctacatagaaaatattgaaaagtataaagaaaagtcgctcataacaacacaattgcaaaacagccactgtgaattggtctttccttctcatctattttatttatgtaatttattttagagacaaggtctgagctaggcactgtggctcatgcctgtaatcccagaactttggaaggccaaggcgggtggatcacctgaagtcaggagttcaagaccagcctggccaacatggtgaaaccctgtttctactaaaaatacaaaaaattaaccaggtgtggtggtgggcgcctataatcccagctactcaggaggctgaggcacgagaatcgcttgaacctgggtgctgaaggttgcagtgagccgagattatgccactgcactccagcctcggcaaccaaagtgagacgctgtctcaaaaataaataaattaattaaagacatatctctagggcagagttataagatcaaacctttcagggctacccatgggccagcccaatcatcctccaggacagaaaggcacccacacccttgtgaccgctttccccctcactgttactgagtatctactttttttttttttttttttggagatggagtctcgctgcgtgcctaggatgcagtgcagtggcgcgatctcggctcactgcaatctccgactcctgggttcaagtgattctcatgcctcagctttccaagtagctgggactacaggtgcatgtcaccatgtccaggtaatttttgtatttttagtagacacagggtttcgccatgttgcccaggctcgtcttgaactcttgacttcaagtgatccacctgccttggcctccccaaagggctgggatggcaggtgtgagccactgcgcctggcctactttttttatttagtaacagctttatggagatataatccatataccatacgttttgcccttttaaaataaacaattcattggtttttagtatattcaggagttacagaaccatcagtgctatctgattttttttttttagatggagtcttgctgtgtcatccaggctgcagtgcagtggcacaatctcggctcactgcaacctctgcctcccaggttcaagtgattctcctgcctcagcctcccgagtagctggaattacaggtgcccaccaccacgcctggctaatttttgtatttttagtagagacagggtttcgccatgttggccaggctggtcctgaactcctaacctcaagtgatctgcctacctcagccccccaaagtgctgggattacaggcgcgagccaccacgcccatcaaccactatctgattttagaacattttcatcagcctaaaaaaaaagcaagtagccattagcatcgctcctcatttccttttccccttaaccccagccctaggcaaccaccaatctactttctgtctttacaggtttgcttattcaagattatttcatataaacggaatcatataatatgtggcctttgcatctggcttctttcatttgccatgatgttctcaaggtttatccaggttgtagcatgtatcagaactttgtccgtttttgtccctgaataagatttcattacatagatacaccacacttgtgtactttatccattcatcattcatcatacaatgggcatggggagtgttttcactttttgactattacgaataaggctgtttatgtgcgtacaaggttttatatggatatgtgcttttgtttctcttggctataaatatagaaataaaatgtctagatcaggtggtttttttgttttgtttttatttttgattctgtttttttgagacagaggcttgttctgtcgtccaggcttgagtgcagtggctcgatctcggctcattgcaacctctgtctcccaggttcgaacgattctcctgcttcagcctcccgggtagctgggattacaggcgtgcaccaccatgaccagataatttttgtatttttagtagagaggcgggtttcatgatgttggccagggtgatctcaaactcctgacctcaagtgatccgcttggcttggcttcccaatatgctgggattacaggcgtgagccactgagcccggtctagatcatatgatttattctatgtttaatgatttgaggaactatcaggctcttcaaagtggttatacaattttacaacccaactaacaggatgagagttccaattcatctacatctcaccaatacaggtgctggtctatcttttttattacagctaccttatgtgtgtgctgtctcacatcgtggttttgaattgtgtctccctgacagttaatgatgttgaatatcttttcatgaacttattggccaactgtatatcttcttcgaagaaatatcaattcagatcctttgcccattttttttttttgaaacagggtctcagtctgtcacccagactggactgctgcagtggtatgatcttggctcactgcaaccttcacctcctgggttcaagtgattctcctgcctcagcctcctgagcagctgggactacaggtgcatgccaccacgtccggctaattgttccattttttggtagagacaaggtttcaccatttttttgccaggctggtcttgaattcctgacctcaagtgatctgcccatcttggcctcccaaagtgctagtcttacaggtgtgagccaccacacccagctctcctttgcccagttttaaactggattgtctttttatctgtctggttgaaaattatttttaatttctgtcaagttgacatgcaaaaatagatagctcattcttctaatttgtatgtttattataacagtgaaggtaaaggtttttccatataatcttgacactttaatttctttttcaacaaattgtctgtgttctctgaccattgtgccctggggtatttggattacaacgcttcacgctaaaagtttaagatcagaataaaagctgcattttagctgaatggtgttcttcccaccccagacaggtagaagcctcaggacctgggatacgcccacattcctctttgccgcttatctctaggtcctgcccactgcggttactccctgggagcggtctggcgggtagtattacgtggtgaagagactgccctttctctctccctgagtcacatctcaggcctgcacacacctggcctctccgacctctgcccaagccacacccatggcctggaccccagggagggagatgtgagttatctatagcggaaacctcctcaggaatcccagtattctccttccacagagatttctcattcttggccagaatggtcatggtagctcacaactgtaatcccaagcactttgagaggctgaggccagaggatcgcttgaggccaggagtttgaggctgcggtgagctacaattgcgccactgcactccagcctggataacagagtgagactctgtctctacaaataataataaaaatttttaaataataataaaaataaaagacttctcattctcatttcccatcaggtcaccaccacccatcccccacatagccccacaacctaattttccctgtctcgcaaggacactttcccccaagttcaaattgcacagatattcggaattcgagttggcttctgtagacaggctggagtgcagtggtacgatctcagctcagtacagcctctgcctcctgggttcaagtgattatcctgcctcagcctgctgagtagctggaattacaggcacccaccaccacacccagctaatctttctatttttagtagagatggggtttcaccgtgttggccaggctggtctcgaactcctgacctcaggtgatccacccgcctcggcctcccaaagtgctgggattacaggcatgagccatggcatccagccctggaatggattttaaaattaatatcgtttaaagcattaaacggtttccaattttgtctttcttcagatttaagattaaaatatctttggccgggcatagtagttcacgcctgtaatcccagcactttgggaggctgaggcgggtagatcacctgaggacaggagttcgagaacagcctggccaacatggtgaaaccctgtctctactaaaaatataaaaattagctgggcgtagtggcatgcgcctataatcccagctactctggaggctgaggcaggagaatcacttgaacccgggaggcagaggttgcagtgagccaagataacaccactgcactccagcctgggtgacacagcgagactcagtctcaaaaaaaaaaaaaaaaaaaactttaatgttaagctattataattaaatattaaataactaaaataactgttcatctctttcctttccacttccaaaaatgacgacgattcagtttgactctgaattacctggatcaccactgctgtgtttcattttacagggaagcttgaataactaattcctttacgtacattcccagagctcagataagcagccattccaaactacggataagaatgtttttttttctgttcgtatactttccccaacttctgctggcctggaatcagtacgccctaaccagcccatagatatgtggtcaggtttctagataaggcataggaacacttagggttagatttgactgagtaattgggcccgaaaccacattacttattcctgacaggtaggaatgttgggctttgctggggaacacaagaaacacccacggggctgtgtgtggaaacttccctgagaggtaaatctggacaagactgtcagaaagactccctggcatcaccagaaactattggccatctactagcccctgccaggggctgctctgtaggggacaaggtggcgggtccaccatccccacccatacatttctcaccccaccccctatcttgtgtaataacgagaccttagccctgaacaaacagcttccagaatagcctctgcaactcagagacagggattggttctcaacagaacacaaagccgctctgagactggagtgagggtttgcaccagggactggggctaaacctctcacacctgtggggccaactgagctgtcctgacctcgggatctgctgttgacaagttctacagtgaagtgagactttctcctccacagagtctattcccttcccacactaaggttcggacatttccgtcagtcccgaaacttgaagagtgggcaaacagccaacacccaagaaaagcaagtactgagtgaacccccgtgtcatcaccagctttacaggcaactcctggggtcggcccgcttatgtggaccctggtacagcatctcggatcccatggttctgcagcaaggaggctatatgagcaacttgagatcctagaggcaggcagtaaaagttggggtgggatttaagaccctgtccttcctgctgctccaggatgagcggtgaggcggtgtgagcggtaggaatgcatgcaacccccagacaccccttcatgggtgatggctgcccaccatcaccccacatcttttgggggaacagtgatgccagcccactctcccgcctcatagcccatgatggcctggtggggggcaggggtgtgtgtgtaaatccatgctcccccaacatcctttccaaagggaagaacatctgacttctgcctggcccattggaaaaccaaagcctgaagatcagggtcaatcgaaacccatcaggaagaggtcctcattggccttgaacctgggaggctgtgacactgagcagttgcagccaccttaccaccagcagaagagtgtctccctagacagggaaccaaccccaggtgggctgagctgagaaacagatttggcgatgtcatctgagccctggatcaagctaggcctgaagccatccctctgtacttttcatttacagcaaccaattcattcccttctttgtatctcaattttctgaattgagatacaatttatatataataaaatacacatattttaagtatatagttcaatgagtttgaacaaacatataaacctgcgtaaccatcactcctatcaaaatacagaacacagaacatttccatcatccccaggcaaccaatactctgatttctatcaccacatatttttgtctgcttttgaactatgtaaatgtaatcagataggatgtagacttttatgtctggtttattttgctcaataccatgttttcagattcacccatgctgtttcatttaccagtagtttgttcctttttttgtttttttagacagagtttcgctcttgttgcccgggctggagcacagtggcgtgaactcggctcactgcaaactccacctcccgggctcaagcgattctcctgcctcagcctcctgagtagctagaattgcaggcacccgccaccacacccggctaatttgtgtgttccttttttattgtgggatagaattctattggaggaacatactagggtgtgtttatctgccaaagttattttggattaaattttctagcacctgcaactaaaaaagtactaactcaaataagtttacctagagtgaaaactcttttctttcctttgagacagagtctcactctgtcacccaagctggagtgcagtggcatgatctcaactcactgcaacctccgcctcctggactcaagcgattctcctgtctcagcctcctgagtagctgggattacaggtgcacaccaccatgcccggctaatttttgtatttttagtagacacagggttttgccatgttggccaggctggtctcaaactcctggacttaagtgatctgcccacctcgccctcccaaagtgctgggactacaggtgcgagccaccgcactggcctagagtgaaaactctctttacaggtcacttacatgcccttaatgtacagtcagattgttcacctgtaagacacgtatttaagagcagcacctagacaaagcccacaggcaggaagactgtacttccagggatcatttctacagttcgttactagagaagtttctctgtacgtgtacagcaaccgtttatattagtgtggcacacacctatctgaaagctttgagtgcagcaatgcggattcaccttgcttgtaactactgttcttaagctcataaaacagctaaataatgtggtgtaacaactaaatgtgtgcccagagaaaagcctcagaatgttatcctaggtgaaatctgttcagtgaacagacagatcacagctacagtgacatttctgccactgttacaagtttcttacaaagtgagaaagtggctgtctaaaatcagacaaaggcctggtgtggtggctcacgtgtataatcatggcactttgggaggctgaggtgggcggatcacttgaggtcagtagtttgagaccagactggccaacatggtgcaaccctgtctcaagcaaaaaatacaaaacttagcccaggcgtggtggcgtgtgtctatagtcccagctactcgggagtcggaggttgcagtgagccgagaacttgccactgccctcctgcctgggtgacagagtgagaccctgtctcaaaaaaaaaaaaaaaaaaagaattaaagtcagaaagagagcccttaccaaaaactgaccgtgctggcaccttgatcttggatttctagcctctagaactgtgaaaaataaatttatgttaagttaaaaaaaaaatataaaactggaggcaggcacttaattaggaagaaaggaaagggtggtcaagctactcctggaacagggcagtttttcttcccctatgggggccctgctccattctgggcagtgcctggcacctgcttcccctccactataggcaatagtatgggcccttcttctgcacagccaaagataaagctcacacatgcagaggtgtttccagcaaatttagggcaatgtgcaagcttgggatctaaaggttcaggcgtaaaactaagtgagagatgacacggtagggctgggccagctcccagccagagagaccttcccacgggatacaggaaggcaggtgtttttagctgcttctccagcaaagattattttctctgcctttctcactccttcctggttacgcaatccctcactcaaccaccaaactctggaaaacagaattgcttgtttataagtcagccagagcaatcaatgagaaagcacagaaaatagcatgcagtacactgcaatacacacatacatctaatttaacttttcaccacactggagattcagggcaggctgggtggaaagaatctagcttgtccatgtccataaaaataaaaacatgaattcagtacttgtcaacagccctcctgcccttccaggatctctgccaggtgtcagggctggaggtgagggcccagccgcctcccccgggaatcccaatccattcacacaggggtggaggggggctcgatatgagtcaacacagccataatctttagttacgagctcccttcagtctcttccagaaatctctataaacccctactgtgtgccaatcacagttatttttcaatatgctgaataacttttttttttttttgagacgaagtcttgctctgttgcccaggctggagtgcagtggtgtgatctcggctcactgcaacctccacctcccgggttcaagcgattctcctgtttcagcctcctgagtagctgggattacaggaatgtgccaacacacctggctaatttttgttttgttttgttttgttttgttttagtagagacgaggtttcaccatgttggccaggctgctctcaaactcctggcctcaagtgatccacccacctcagcctcccaaagtgttaggattacaggtgtgagccactgcgcccagccttgaataactaggcttttactgtgcctcccaccacatcaaatcgtgaacatttccatgaatcaactgtatttccagaccaatgatctgcttatttcaactggtaggacacactcaacaacagttttaacagttttgcttttttttttttttttgagatggagtctcgctctcttgcccaggctggagtgcagtggtgcgatcttggctcactacaacctctgcctcctaggttcaagcgattctcctgcctcagcctccagagtagctgggattacaggcgcacaccaccatgcctggctaatttttgtatttttagtagagatggggtttcaccatgttggtcaggctagtcttgaactcctgacctcgtgatccacctgccttggcctccaaagtgctgggattacaggcgtgagccactgtacctggacacccagctaatttttgtattttttactagagacgtggtttcaccatgttggccaggttggtcttgaactcctaagacctcaggtgatccacctgcctcagcctcccaaagtgctgggattacaggtgtgagccaccgcgcccagtctcttgtttttgagacaggatctcactctcttgcccaggctggactgcagtggcgtgatctccattcactgcagcctcaatatcctggggctcaagcaatcctcccacctcagcctcccgagaagctgggactacaggtccacaccaccacacttggctaattttattgtattttttgtagagacagagttttgtcgatgcagcccaggctggtcttgaactcctgagctcatgtgatctgtccaccgtggcctcctaaagtgctgggatcataggtgtgagccactacatccagccttgtttttttaccacctgcccttttttcttctttgttttttttttttttttttgagacagaatcttgctctgtcacccagcaggccggagtgcagtggcacaatctcagctgactgcaacccccacctccgaggttcaagcgattctcctgcctcagcctcccgagtagctgggattacaggcacgcagcaccacacccgactaattttgcatttttagtaggaacagggtttcaccatgttgtccaggctggtctcgaactcctgacctcaaatgatcctcctgcctcggactcccaaagtgctgggatcacaggtgtgagccactgtgctggtccccttttctcttgttacaatcaaatggaaacctggccatagggaactccgagggtctgaatgggcagccctgagggactcacatcattcaccgtggtgtctccgtccctggtgctccaagtggggaaccttgtcctcacttggcacccattactgctgctctgccagacacccagcctctggctgagcggtacctgcagttcgactgtgtcctatggctacctccaatgcagcctttgtgtcacgggacgctggtacctgagccaaaggaggaagtgttgatcaggctaaagccaacgcccagtagcatcaggtggtgtcgtggcaaccatccaaatggccccaggaaacaagggacatttacagtgttatagttcatcacgttgtctctcctctgagtcaccctgaaaattctgtttctgccaggggatacctcccagccaggatcccacagttgaagactgttggtcaggcagaccctcggggctgatggtggataccatgcagctgggcagaccctcccctctccaaggccacagtcagcctggatccagcctggcctttaagatctggcttagggctgggtgcagtgattcacacctgtaatagcccaccactgagatgggaggattgcttgaggccaggagttgaagaccagcctaggcaacacagtaagaccccatctctacaaaaaataaaaataaaaatcagccaggtgtggcaatttttaatcacatctctagtcccagctagttgggaggctgaggcaggaggatcacttgagcccaggaggtcaaggctacagtgagctacaacggtgccactgcactccagcctgggtgacacagccagattctgtcatctttaaaaaaaaaaaaagctgttttagaccatcatggggaatcaggagtggggtcagcatcaccaacctttactctcctctgcctccctccctctccacctgggaattgactcaagggtccaaggggatggatctaaacagccggaggggtagtatcagtaccaatagagctggagctgctgatcccacatgacccacgctgttcctggtggactcagcccatcagaaggcttcctcatccacacaagcgttcataaaagatgcacacaagtgtctaacacgaaattagccctcactaagatgaatgctgctcattcatcaaagagtagatccctgctccttgcagagagaagactgcaaggagcttctgggttaaaaaaaaaaaaaaacaacaacaaacaaaaattctccttccttctctgccggagcctccaggaagcccagagtcaacagggaccataaaccaggacacaatgaacccggaggccctgtccaggctggaggtttctgtgaacaagaaacaacttctcctacagctcttgagtaaaaacaatggagctaaattcattttggggcattagcattcccaaaggatgaagaggcagagataagaagtgacaatgcctcactgtgtactcactctcctcttccacatagtgccaagacctttcattttgggcctttcaatggccctggggaaaggctttctctagtttgtttccagctgcttttcttttcttttttttttcttttttcctttttttttttttgagacggagttttttgctcgttgccctggctggagtgcaatggcgtgatctcagctcactgcaacctctgcctctcaggttcaagccattctcctgcctcagcctcccgagtagctgggattacaggcatgcaccaccacacccagctaattttgtattttcagtagagacggggtttctccatgttggtcaggctggtctcgaactcccaacctcaggtgatccacccacctcagcttcccaaagtgctgggattacaggcatgagccaccacccccggccttccagctgcttttcttcatggccacaacagattttcctgtgagttttagtactgtggggtacaggggcagttgcagaaaaggaatctctatcaggatgcagcattctagaaaattacattactctgcatttaactacaggccagagaacaataattcttccaagattttcagtaggaagagcataaaaatctggggaaaagaagttgcatttccacttcttgagaaattatagtaatataagttgagaaagtaatttataataatcttatagagctgtacctctgtttaaacacagtaacataatgagaaagaaaaaatatagtgagaagccagggaaagctgggtgcggtggctcatgcctgtaatccgagcactgtggaaggctgaggcttgggcccaaagagttcgagaccaggccgggcgcagtggctcacgcctgtaatcccagcactttgggaagccgaggcgggcagatcacaaggtcatgagattgagaccatcctggctaacatggtgaaaccccatctctaataaaaatacaaaaaaaaaaaaaaaaattagccggacatggtggcggtcgcctgtagtcccagctactcaggaggctgaggtaggagaatggcgtggacccgggaggtggagcttgcagtgagccgagatggtgccactgcactccagcctgggcaacagagccagactctgtctcaaaaaaaaaaaaaaaaagagttcgaggccagcccaggcaacacagtgagaccgtctctacaaaaaatttaaaaattagccaggctttgtggctcatgcctgttgtcccagctactcaggaggctgagacaggaggatcactggagccagggaggttgaggctgcagtgagctatgatcatgccactgcactccagcctggatgacacagcaacaccctgtcaaaaaagaaagaaaagacaagaaaagaaaagaaaaaagtgagagacatgattttataatagacctgaggctgggcatgatggctcacgcctgtaatcccagcactttgggaggtcaaggcaggcagatcacctgaggtctggagttcgagaccaacatggagaaactttgtctctactaaaaatacaaaattagccgggcatgatggcacatgcctgtaatcccagctactcaggagcctgaggcacatcacttgaacccaggaggcagaggctgtggtgagccaagaccgtgccactgcactcctgcctgggtgacagagcgaaactccatctcaaaaaaaaaaaaaaagatagaaaaaaaaaaatagacctgaaaggtttcttttttcagagacctcccaaggtaccagcccagaccaggagatctgtactgcgggtgtccatttccaacctgaggctaagttatgtcttgaggctctgtacagccaagtcatcctacctgattccaaaaagaccaattaacaaggggactcctgggctcggcgcagtggctcacacctgtaatcccagcactttgggaggccaaggcgggcaaatcacttgaggtcaggagttcaggaccagcctggacaacatagtgaaacaccatctctactaaaaatacaaaaattagctgggcatggtggcgggtgcctataatcccagctacttgggaggctgaggcaggagtattgcttgaaccccggaggcggaggatgcagtgagccgagagtgcaccactgcactccagcctgggcaacagagcgagactccatttcagaaacaaaaaaagccaagaggctgattccttttcaagcatggccggagccatcccaacaaagcaccaattcccagcactgctcagcactccaggaaacgagacctgctgggaactgctgccaaagaaactgtatcgagtcagggtctggaatgccccagaacctgaggaggggtcaggcactgagctgtcgctccataaatccttttcggatgaatggagcataatgtcattttaaagaaaaggggagggaaggcatgacacagagaacaggatgaaagagaagcctgacttcagtggaaattcatttgatccttaagtgtgcataaaatcccaatagtcaccaggcgcagtggctcatgcctgtaatcccagcactttgggaggccgaggcaggtggattacgcagtcaagaggttgagaccatcctggacaacatggtgaaaccccaactctactaaaaatacaaaaattagctgggcgtggtggcacgcgcctgtagtcccagctactcaggaagctgagacaggagaatcacttgaacccgggaggcggaggttgcagtgagccaagatcccgccattccattccagcctggcgacagagcgagactccgtctcaataacaacaaagaaatcccaatagtcaaaatacaggtccaggtgcagggactcacacctataatcccagcactttgggaggccaaggtgggtggatcacttgaggtcaggagttcaagaccagcctgaccaacatggtgaaaccctgtctctactaaaaaatacaattagccgggcatggtggcgcacatctgtagtctcagccactcaggtggctgaggcatgagaatcgcttgaacccaggaggtgaaggttgcggggagctgagattgtgccactgcactccagcctgggggacagagcaagactctgtctcaaaaaaaaataataataatacaagatgggaagcctcatgggttctcactcactgcccccggctggctcagccacccaatcaatgcagcagctgttggcaatcttcaccccccgcctcgactcctgggccccatccccagctcaccttctccctgaatctccagccattccccacccaacttcttcacttttgtttttttcttttatcattttttttttttttgagacggagtctcgctctgctgctcaggctagagtgcagtggcgcgatctcggctcactgcaacctccacctcacaggttcaggcaattctcctgcctcagcctcccgagtagctgggatcacaggtgcccgccaccacgccttgctcattttttgtatttttagtagagacagggtttcaccgtgttggccaggctgctctcaaacttctgacctcaggtgatccgcctgcctcggcctcccaaagtgctgggactacagtgtgagccactgtgccctgccacacctttgtctttaaccagctctggacttccacattctaaaacaaagctgccttctctcttctcagctcccctctttctccagcaatatcttccctgcccttctccccctgtaccctgtcacactgacttttgtccccaattctccaaccatgcatttcctaacgactcctaaagaactaaatctaggaccttccagcattcttctgacttgtcacgccttgctcgactaacaagactgacctctcagcttcctagacctggccacccttctggctttcctcccacctctctacccacctcttaagcggaggatcctttctagcccagatcctttcactcaataccccaactgcctcccagttggtgccacccaaaactgcatctccagccagggcgcctgcatggctgctgggcccatggagtgggctctctgctgggaccgccacatggatatcccatgagggccatcaagtctacacactagcctccgcgttcacccgcattcatggatcttgaggaggcgcatgaccagacacctcaggcaggcattgtgacgttttttttgagacagggtctcattctgctgtccaggttggaatgcagtggcgtgatctcggctcactgcagcctccatctcccaggctcagcgatcctgctgcctcagcctcctgagtaggtgggaccatagctgggtgccaccacacctggctaataggcaggcattttggattctcattggcagctccttccctgccaatcacatcagttctttccctctctgccagatattgccctttctccagctctatcattccaacctcctcatcactagaatccctgccttctgtgtggacccctggtctgagctaagggtgcaagctggtggaaagaatgggtgattgaggctgtgtttacacggccgtttctttgtttgtttgtttgttttttgtgagacaaggtctcactctgtcatccaggctggagtgcagtgacatgataacagctcactgcagcctcaacctcgtgggctccggatatcctcccacctaggcctcctgagtatatgggattacaggaacacaacactatgccaggctgatttttaaacttcttatagagatggggtcttgcttattgcccagagtgggcttgaattcctggcctcaagcaatcctcccaccttggcctcccaaaatgctgagattacaggtgtgaggcactgcaccccactcacagcactgtcactgactgcatcatcagtagtccgtaaaagagaaggaagggcaaagatgataggtattacaaggggctaaatcctcccaatgcctccctgcctggctccaccatagcttctttcccattcgccacccattcaccattcacgtgtcaaagcggtctttttcttacacaaatctcacaggtctggtcctgctttaaatactttgatggattccacagttcccaggtcaagcaagatgcatgaccctgaactgcctggctcccacaaacacctccacaccctgggggggcctacaaagcactcacaagtccacagctctgtccaagctgttccctcttcctgaagggctctttctctcctttcacctggacagcacctgcctttctttttttttttttttttttttgagacggagtctcgctctgtcacccaggcagtggcgcaatctcggctcactgcaagctccgccattctcctgcctcagcctcccgagtagctgggactacaggcacccgccaccacgcccggctaattttttgtatttttagtagagacggggtttcactgtgttagccaggaaggtctcgatctcctgacctcgtgatccactagactcagcctcccaaagtgctgggatttttttttttttttgggttgcaggggtacggagtctcactctgttgcccaggctggagtgcagtggcacaatctcagctcactgcaacctccgcctcctgggttcaagcgagtctcctgcctcagtctcccaagtagctgggattacaggcgcctgccgctacacccggctaatttttatatttttagtagagacagggtttcaccatgtaggccaggctggtctcgaactcctgatctcaagtgatccacctgcctcagcatctcaaaatactgggattacgggtgtgagccaccacgcctggtcagcacctgcctttcattcggccatttggttttgttttgttttcatttttatttttaaaattttttatagagccaaggtcttgctatgttgcccaggctggtctggaactcctggcttcaagagatccgcctgcctcggcctcccaaactactgggattacaggtatgagccaccacacccgaccctcatttgctttaggtcaaactggctcaggtcatagatcaggaaagattcagcatcaacaccttttattttcctaggataaatagactcttcgaactggtatgacttaacatggagtagcacaacaattgttacaaggtctcattttcaaaattgatgattttaattgtaaaacaatgattcctcttattttgcacccctgattctctcatccaacaccagagaaactgcatctaaaaaacaccccactttaggaggccgaggtgggtggatcacctgaggtcaggagttcaagaccagcctggccaacatggcaaaaccttgcctctactaaaaatacaaaagttagccaggcgtggttgatatgcgcctgtagtctcagctactgggaaggctgaggcgggagaatcacttgaaactggtagatggaggttgcagtgagccgagatcgcgccactgcactccagcctgggtgacagagcgagactccatctcagggggaaaaaaaaaaaaacacctgtagccgggcgcagtggcttacacctgtaatcccagcactttggaaggccatggcaggtggatcacttaaggtcaggagttcaagactagcctgggcaacacggtgaaaccccgtttctactaaaaatacaaaaaattagccaggtgtggtggcaggcgcctgtaatcccagctacttcggaggctgaggcagaactgcttgaaccccggaggcagaggttgcagtgagccgaaatcacaccactgcactccagcctgagcgacagagtgagactctgtttcataataataataataataataataataataataataattaataaatgaaaaacacccaactgtgcacctttcctagctctcttgccatccactctttcccagtgcggagcaagaagtcctcccctgggctcacagacacggagggctcccacaggaaaatgtgttctgggaggcttgggaccacccctcacaggtgtgcttctcttgctgccattttcccccaggtgctgctggagttccagagctacacctgctcagagaacaatctggggaggaaatgtcccagaaagaggcagcaacttgcgggaggccacacagcaattttgtgggagtggcagtcaggccccggggcccgaggacagacataggaattcccaggccaggcctcctcctgcaattccatggcctgtgatcctctgtcccaaacgccacacataattagaagttataatcctgtaattccatgatgacatctttaaacttaaatatacctcaaaactactttttttttttttaatgctaaaagcaacttcacaaaaaagaagttttcccactctgccccacactgtcctgcccagggctcctcaccagtgagcaaagcccacagtctctctgtgtcacctgggagaaggaggaagatgccaagaccatttaagaactggatcctaaggctttgaacaattaagaattgattcgtttatgggaaagtttcacttccctatttataattatgcactgtcgtatctattataaaaacgaaaatcaacaacaatctctccaccctctcagtgatccctggccaagggccaaaagctatttttagacttgctcaggacctagagggaggaaggcttggaaggcatcaccatgactcccggctccaaagcatctttgtagcccaggccctgccgcctgcgggtatcccagggcccctgctccacaggctggggtcgcttttgagggactgagctccctgactgttatcttctgggcccaagagctcctggacatgccaagaacctgcgaggccggcacccgccacccgccgcccgccgcccgccgcccgccgccagcccccgccaagtctcccggacaacaagacaaatccgctttggcacacagtgagacgcacaagaccgtgggcctcacctgcggtgctcacgccctcctggacgacccggagcggaggagggtgcaacgccggaggctccctcccaccagcagctctcccctgctccctgaaaagtcccacaggcggactttggaagcattttggaggcaaaaagagaccgccggccgggcgcagtggctcacgcctgtaatcccagcactttgagagaccggggcgggaggatcccttgagcccaagagttcgcgaccagtctgggcaacacagcgataccccagttctacaaaaaattagcgtggcgaggtggcgcgcctgcagtcccagttactcgggaggctggggcgggaggatcgctggaggccaggaagtcgaggctgcagtgagctataatcgcgccactctactccagcctgggcgacagagcgcctaaaataaatatgagaccgccaacacgcctgggatggtctgtctccacccgcgctcccaccaagcgctcttgcaacgcgcccagaggccaagggcgccagcgcagccaggaacgggtcctttccccaggcaccagggatcgcaagcgaggggtggcggggggtgggaggggggagacccaagcacccctccaggtcctccgcccgcacctgcgcggagcggccacatgcgcctcccctactccccgcccagtcccggatgccacctgcccgggacgccggggacatcgccgcccccactcctccccgccagcctccgtccggccagcgccggcccagtgcgccccctccccctcccggcctagtggaccccgactgcgcgctcccacggcccctgcagggcccgggggaaaggaggtctggagcccgcaggtccccgcccgcccgcccgaagccgcccaccttccgaaagtagccgtcgttctccttctccagcggctggggggccgcgggcaacagcgcgtcggtcatgctagcggcgcgggcgcggagggcggacggcggactgaggcgcggcggctgaggctggcccgagaggacgtgcggccccgcccctgtccccgcccttccccgcccctccactcccaccccgtcccgcggcccttctagccccgcctgaggccgagcactggagccctggagacgcgccccgccccgtcgcgggccccgaacccgcgccccttgaggcgctcgtcacccggagagctgcgccctgggcgcggcgcctcggggttgtctgtgggcgtcgtggctgactcaactttgcgagtgccgcgagagcgcaggaaaggcactggggtctcaggggccgcagcgaagccctggctgtggacctgcaccctgccctggagcccggggagtcagtgaggaaggcgtggatccaggcgcgtccctcctgggtgaagcccgtgcgccgcgggggaaggggccagactcgacgccacgtcgagggcgcggcgggagctctgggccctgggcccggcggtttggaaaagcttttcccaagaggggagcccatggcggagggagcgttgactgccccgccgagcgccttgcccggactactcgggcttgttggcatgggatcaactcagccgattccctgtccgcgctgcaaagacgagtgggatccgctgggctcgcggactgccctgagagaggggaccaggaggggttttgcgccccagacacggcagatgtccttgagcacagttcttttttttaagagatgggacctcgctctgtcgcccaggctggagagcagtgttgcgatctcgactctttgcagcctcgacctcccaggatcaagcgatgctccagcctcagcctcccaagtagcaggggctgcaggcgcgggccaacgcgcccggcctttttatttattttttttatttttttatttgagacggagtctcgccctgtcgcccaggctggagtgcaatggcgcgatctcggctcactgcaacttccgcctcccgggttcaagcgattctcctgcctcagcctcccgagtagctgagactacaggcgtccaccaccacacccagctaatcttcagtagagacagtttcaccttgttggctaggcttgtcttgaactcctgaccttgtgatctgcccacctcggcctgcctcccaaagtgctgggattacagcttttgttttgttttgttttgttttgtttttaaatagatgcggggtctcaccatgatatcaaggctggcctcgaactcccgaccttaagtgatcctcactcgtctcgctctgtcgcccaggctgaagtgcaatggcgcgatctcggcttactgcaagctccgccccccgggttcatgccattctcctgcctcagcctcccgagcagctgggactacaggcgccggctaccacgcccggctaatttttttgtatttttagtagagacggggtttcacagtgttttccaggatggtctcgatctcctgacctcgtgatctgcccgcctcagcctcccaaagtgctgggattacaggcgtgagccaccgcacccggccgtggagcacggttcttaaccacctccgttttctaggctgcaaaatggggctcttttattattcttggattctttttttctcgggctgatggagggcagtaggacaaaagtgagtgttggaaagtagggatgaacttagtttaggagggaaagggtgacccatggggacagggtttgtatcagtctgccaccaacctcctgctggctgctagactctgtgggcagacgcctggcagcacgtgaagccaggaccttgccacctaagcagggacacccagcccgcgggccatgctcctcccggccgctgcttactgttacaactgcttctcccccagcaaagggaccgccctcagcggtcgcgatagatgccacaggtggaacagaatgcaatgtgctgcaaaaccagcccagcgttaacatatctttaaaaaaaaaaaaaaaaagtccgggcgcggaggctcacgcctgtaatcccagcactttggaaggccgaggccgaggccgaggctgagactggtggatcacctgaggtcaggagtttgagaccggcctggccaacatggtgaaaccccgtctctactaaaaatacaaaaattagccaggcgtggtggtgggcacctgtaatctcagctactggggaggctgaggcaggaaaatcactcaaactcgggaggcggaggttgcagtgagccaaaccgagaccttgagactgcccactgcactccagcctgggcgacagagtgggaccttgtttcaaaacaacaaaaaacgttagtcattggaaacatagtagaggttgcagctgtcagggacgtttctgaagccagtgtcttcgagcctatgcgcttcctaaaccgcacgtgaagctactgggttggtccaaaggtaattgcaattactgggtgagttgtgccagtcacagaaatgtaatcaggaattcagctcctgtagcctgaaaggacagaacaccctcatccagatttaatcctgcaggtgctgccccaggacctccaccaaagccccttaggagctaagtccttgaggattgaagaaaaactcctccggggaaaaaaaattacattaaaaaaaaagaagaagaagaaacaactatcaatctaatttcagcactcacaggtcacactattacttgtaaacagctactactgtttcaaggatcaggaagttgtgggccactctcttaccttcataatactaataaacgtatcaataatagagcctctactctagccagggagtttatagatactatgtttcgttcttgagacccttctgcaaataaaagcaataaccttcattcaacagatgagaagagcaaggctcagagcaatgaagtggccaccagcactccccttgctggctgaggtcattgcctaccacctttggatttttgccatctttttctgccaacttaaagctcaaattgcctttacaatttgtcgcacataatgccatctgtactgctgttaacttaataatcttttttttttttttttaagacagggtcttgttctgtcatccaggctggagtgcagtggtgcaatcttggctcactgcaacctctgtttcccgggctcagatgatcctcccacctcagcttcccaagtagatggaaccacaggcatgccccaccacactcggctaatttttttttattttttgtagagacggggtttctccatgttgcccaggctgggctggaactcctgagttcaagtgatcctcccacctcagcctcccaaagtggtgggattacaggcatgagccaccacgcctggccaataatcttttttttaaattactttatttaaacaaattaattaaatttatttagttagtttttgagacagtgtctcgccctgttgcccaagctggagtgcattggtatgattatagctcactgcagcctccaattcctggacttgaaggattcttctgcctcagcctcccaagtagttgggacaacaggtgtgcaccactaacttggctaatttttaaatttttgtagagatggggtctcactatattgctcaggctgttctcaaactcctgggctcaagtgatcctcctgccttggcctcctaaagtgctgagattacaggcatgagtcactgtgcctggcccaaattttattttaaaaggcaactatatcacaaccataaggggaaaaccagtgatactttccctgttagaggagaaacataaaagtgaatacaataaagggcaaaatatattattaaatctagccagatatcattgcctttttgagttgttccttttgttaaaaaggaagaagagaccaggcacaggctggagtgccgagatcacaccactgcactccagcctgggtgacacgagtaagaccctgtttcaaataaataagtaaataaaaataacagccaggcatggtggcgcatgcctgtagtctcagctactcaggagactgaggcaggaggattccttgagcccaggaggtggaggctgcagtgagctatgatcgttgccactgcactccagcctgggcaacagaccaagaccctgtttaaaaataaataaataggccgggcacggtggctcacgcctgtaatcccagcactttgggaggccgaggctgatggataatctgaagtcaggggtatgagaccagcctgaccaacatggtgaaacgccgtctctactaaaaaatcaaaacattagctgggcctgatggcacaggcctgtgatcccagctactcaggaggctgagacaggagaattgctttaacctgggaggcagaggttgcagtgagccaacatcgcgccattgcactccagcctgggcaacaagagcgaaactccgtctcaagaaaatagtaataataaaataaataaataaataggccaggcgtggtagcttacgcctataatcccagcactttgggaggccgaggcaggaggatcaggaggtcaggagtttgagaccagactaaccaacatggtgaaaccccgtctctactaaaaatacaaaaattagccgggcatggtggcatgtgcctgtaatcccagctgttcaggaggctgaggcaggagaatcacttgaacccgggaggcagaggttgcagtgagcccagattgcgccactgcactccagcctggaaaacagagcaagactctgtctcaaataagtaagtaaataaataaataaataatgtaaaaaataaaaaggatgaagagtaagaaaaggacgcgtggtgttaaacacacaccagcccacccaaagactacctcctgagcatcttcagaggaaaacgggctcctctctgtgtaagtcccagcggggcatttcctggccatgtgagccatctgagtgtcagtgcttggggctacatctgcgcagaaccagacatctttagacattctcatgactcattgcactggtacccacaggtctgttcttttatctctgatcccactttgaccaggcaattagaactgccgccgctgacccaacaggacagcagcatctcacctcctatttgtcaaccccattggtggtctgtgcaacaagaaccacccatgagcccctgtgctactaacaaaagagttgggtgggaacttctgagctatgcaaaagattaaaatctcaactgcaaacaactgttttgttaagtctcattttaccatctggtttaggtcagcaggtgcctgtccagggacccagttgggtgcctgtccagggacccagttcctccaagtaaaattcaagtgtcacgtcctaagaccttcttgttgacaaaggaatgttggtttttgagggcagcctgaaataacatcctctcttggggaatctgatgaagtttgccaaattaaatgcagaaattataagataatccttgaatgaataaaattcactgcaaatagtaaactcaactttgcaattttttttttttttttttgagacagagtctccctctgttgcctaggctggagtgcagtggcacgatctcagcttaccgcaacctccacctcccaggttcaagtgattctcctgcctcagcctccctaatagctgggattacaggcgcgcaccaccacgccttgctgattttttgtatttttagtagagatggggtttcagcatgttggccaggctggtcttgaactcgtgatctcaggtgatccacctgcctcggcctcccaaagtgctgggattacatgcatgagccaccatgcttggcccattttgcaatttttgtaaaaataattcttagaaattaccaggcccagtggctctcacctgtaatcccagcacattaggaggccaaggcaggaggatcacttgagcccaggagttcaagaccatcctgggcaacatactgaaacatccatctctacaaaaaaatttaattaattagccaggagtggccgggcgcagtggttcacgcctgtaatcccagcactttgggaggctgaggcggagggatcacttgcggtcagaagttcgagacctgcctggccaacatggtgaaaccctgtctctactaaaaatgcaaaaaattagctggacttagtggtgggcacctgtgatcccagctactcaggaggctgaggcaagagaatctcttaaactcaggagatgaaggttgcagtgagccaggatcgcactactgcacttcagcctgggcaacagagtgagactccatcacacacacacacacaaaaagccaggagtggtagcacatgcctgcagttccagatactcaggaagttgaggcagaaggatttcttgagcacaagagttcaagactgcagtgagccaagattacaccaccgtactccagcctgggctacagagcaagatactgtcttataaagaaaaaaaaaaaattggccaggcgcgatggctcacacctgtaatcccggcactttgggagcctgaggtgggtggatcacgaggtcaggagatcgagaccatcctggctaatacggtgaaaccccgtctctactaaaaatacaaaaaattagccaggtgtggtggcatgcgcctgtaaggtcccagctacccaggatgctgaggcaggaggacggcgtgaacccgggaggtggaggttgcagtgagctgagatggcaccactgcactccagcctgagcgacagagtgagacgtcgtctcaaaaaaaaaaaaaaaaaaaaaaattaaaattctcagaaatttaagccatttggtgccatggaggaacaccaactagagaggaccacatcaagttcagcaggctcaaagtccccttagccacacccttttggccctcacagtctcagttttccccactttactaaatatatatatacatattttttttttcgagatggagtcttgctctgtccccctggctggagtgcagtgcagtggtgtgatctcagctcactgcaacctctgcctcctgagttcaagctattctcctgcctcagcctcccgagtagctgagatcttaggcatgtaccaccatgcctggctaatttttgtatttttagtcaggctaaattatattgatcaggctagtctcgaactcctgatctcaagtgatccgcccgtctcagcctcccaacatgctgggattacaggcgtgagccaccgcgcccagtctacaataaattcttacacatagctgtcatttcctgcatacttattccgtgccaggtgctgtcctaagtacactgcatgcattagctcagttctcccacaaccctgtgaggtaggtactttatcatcccctttttacagagaaggaagctgagcctcagaggtcaccagcctcctaagtggcagagtcagggctgtctgatgctatgctatacactatactgtattacactcttccctagtacttaaaaggaaaagtgttttgacatatagggaggaagtgattgtggattaaaaataaatgaattacaagcctgggcaacatggtgaaactgtatctttacaaatgatacaaaaattagccaggtgtggtggcacgtgcctgtagtcccagctacttgggaggctgaggcaggaggattgcttgaacctgggaggtggaggctgcagtgagcccagatggtgccactgcactctagcctgggggacaaagtgagactctgtctcaaaaaaaataaaaaaataaataaagaataaatgaattacagggatggcaaacaataccaagtactggtgagactgtggaatctcatatattgcttatgggagtgtaaattgggatgaccacactggaaaattgtttgacatttgctactaaagaatatatgtgggccaggtgccgtggctcatgcctgtaatcccaacactttgggtggccgaggtgggtggatcacttgaggtcaggagttaagaccagcctggccaacatggtgaaaccctgtctctactaaaaatacaaaaattagctgagcatggtggtggatacctgtaagcccaggtactcgggaggctgaggcaggagaatcacttgaacccggcaggcagagattgcagtgaaccaagatcatgccattgcactccagcctaggcaacaaaagtgtaactccatctcaaaaaaaaaagaaaatatgcatgcaacttatgatccagaaattccaactctaggtagatacacaacagaaatgcatacatctatttactataaaacaggaatcagaatattcacagctgcactattcaaaatagcgtggccaaatgcggtggctcacgacagtaatcccaacacttagggacgcagaggtaggaggatcgtttgagcccaggtgttgagaccagcctgtgcaacatagtgagaccccatctctgaaaaccaaaaaaaaaaaaaaaaagcctctaactagaaagtacccaaatgccaatccactatagaacaaatgagtgtgaatggtggtatattcacacaatagaaaattgcacacaatgaaaattaacacattgctattatgtgcaacaacatggataaatgtcacaaaaatattattgagcaaagaaaactagacacaaatactgtatcattccattttatttgtatttatttatttttttcctgagactgtgttttgctctttcgcctaggctggagtgaagtggcaagatctctgctcactgcaacctccactcaccgggttcaagtgattcccctgcctcagccttctgagtagctgggattacaggcgcgtgccaccatgcctggctaattttttgtaattttagtagagatggggtttcaccatgttggccaggctggtcctgaactcttgacctcaggtgatccacctgctttggtctcccaaagtgttaggattacaagcgtgagccaccaccacgcccagcctccattttatataaagtacaaaatagacaaaactaacccattatggggttattgcttctgggattctggaaattttctatttcttgatctacttgttacacagatatgcttactttgtgaaaatacgcagaaccaggccagtgtggtggtttgtgcctgtaatcccagctactcaggaggctgagacgggagattggcttgacctcaggagctgaagatcagcctgggcaacataaagagaccttttctctacaattaataaacaaattagctggacatgatggtgcccgcctgtagtcttagctacttgtgaggccgagtgagaggatcacttgaggccaggaggtcaaagctgcagtgagctgcaatggcgctactatactacagcctgggcaagagtgcaagaccctatctcttttttttttttttttgagacggagtctcgctctgtcgcccaggctggagtgcagtagcaccatctcggctcactgcaacttctgcctcctaggttcaagcgattctcctgcctcagcctcccgagtagccctatctctttagggccaggcgcggtggctcatgcctgtaatcccagcactttgggattgctgaggcaggcggatcacgaggtcaggagatggagaccatcctggctaacacggtgaaaccccatctctactaaaaatacaaaacattagccaggcatggtggcacatgcctgtagtcccagcaacccaggaagctgaggcaggagaatcgcttgaacctgggaggtggggaggttgcagtaggctgagatggcgccactgcactccagcctgggtgacagagcaaggctccatctcaataaataaataaattaattaaataaacaacaaaaatgcatagaaccatgtgctcatgatttatgcacgttatttttttttaattttcttaaattttagtccatgtcctactgaacatacatgttatattttaaaaaggaaaataatgggctgggcgtagtggctcacgcctgtaatctcagcactttgggaggctgaggcgggagaatcacaaggtcaggagtttgagaccagcctggccaacatggtgaaacaccgtctctactaaatatacaaaaaattagctgggtgtggtggcaggcgcctgtaatcccagctactcgggaggctgaggcaggagaatcgcttgaacctgggaggcggaggttgcagtgagccaagatcgcgccactacactccagcctgggtaacagtgcaagactccatctaaaaaaaaaggaaaacaatgataaaaatgagtgatactggccaggtgcggtggctcacgcctgtaatcccagcactttgggaggccaaggagggcagatcatttgaggtcagttcaagaccagcctgaccaacatgatgaaaccccgtctctactaaaaatgggaagaaactagccaggtgtggtggcaggtgcctgtaatcccagctactcgggaggctgaggcaggagaatcacttcaacccaggaggcagaggttgcagtgagcagagatcgcaccactgcactgtagcctgtgcaacagaacaagactcggtctcaaaaacaacaacaacaaaaacaaaacaaaacaaaaaaagagtgataactgttttcaaagcacattgggtgggtttccgtgcatgttatgagtgaccatcacactgccagcacccatgcatggacccagaggaaggaatgacactgggcccaggtgattcagcccatcttcctatctgcagtttcctcataaggtcctgagatttgcactttcttgcatgtctgaataagaaagcaagcaagcctatattggcttataccttgccataaatataaatacataaataagaggccaggcaccatggctcatacctgtaatcccagtgctttgggaggccaaggcaggagtatcacttgagccttggtgttcaagaccagcctgggcaacacagcaagaccccgtctctacaaaaaatagaaaaattagccaggcttggtggcacatacctgtattcccagctattcagaaggctaggttagtaggattgtttgagcccgggagttccaggctgcattgcactccagcctgggtgacagactgagaccctgtctctaaaaaataaataaatagaacagaaagaaaggaacggtttgtgggctgggtgtggtggcttatgcttgtaatcccagcactttgagaggctgaggtaggaggatcactggcacccaggagcttgagaccagcctgggcaacactgcaaaattgcttctttacaaaaaatacaagtattagccaggcatggttgtacatgtctgcagtcccagctacttgggaggctgggatgggaggactccctgaacctggagaagttgaggctgcagtgagccatgatcgtgccactgcactccagcgacagaatgagaccctgtctcaaaaaaaaagaaaagaaaagctatgtggtggccaggtgcggcggctcatgcctgtaatcccagcactatgggaggccgaggagggcagatcacttgaggtcaggagtttgagaccagcctggacaacatggtgaaaccctgtctccactgaaaaaacaaaaattagccaggcgtggtggcgcctgtaatctcagctactcgggaggctgaggcaggagaatcacttgaacccgggcagcggaggctgcagtgagccacgatgccgccactccagactgggtgctagaacaagactcagtctcaaaaataaaataaaataaaataaaataaaataagataaactaaaataaaataaaaaagttattgggtgttctttgcctattttgaagctacaagctgtaagaaaattacgagtaatatagaaataaaatcatggactttggtgttttgtctgaatatatgaatttgtccccaatcttttttactttcttttactttttcttttctttactttttttttttttttcttgagacggagttttgctcttgttgcccaggctggagtgcaatggcatgatcttggctcactgcaccttctgcctcctgggttcaagtgattcttctgcctcagcctcccgagtagctgggattacaggcatgcgccaccatgcccagctaattttgcatttttagtagagacagggtttctccatgtttgtcaggctggtctcaaactcctgacctcaggttatctgcctgagtgctggggttataggcgtgagccactgcacccggtttcttttactttttctttgagacagcgtctcattctgtcacccaggctgcagtgcagtagcgcaaattctgctcactgcagcctctgcctctggggctcaattgattctcccatatcagcctctggagtagctgggactacagacacgcaccactatgcctggctaatctttgtattttttgtagaggtagttttggcatgttacccaggctggtcttgaactcctgggctcaagtgatcctccttacatggcctcccaaagtgctgggattatggacttgagccacttcgcccaactttctttactttctttttttttttttttttttgagacagagtctttgtcgcccagactggagtgcagtggcacaatcttgactcactgcaaattctatctctcaggttcaactgattctcatgcctcagcctcccaagtagctgggactacaggcatgaggcaccacacctggccaatttttgtacatttggtagagacagggtctcaccgtgttggccaggctggtctcaaactcctgatctcagatgatccacttgcctcggcctcccaaagtgctgggattacaggcgtgcgccactgcacccaccctgattaagtatagtttactatgtttatttatcctcaaacattccaaagcttgaggatagccacccagaaacaccaattccaaatgtatagggtcaacattccaaaggggagcccaggcacgatggctcacgcctataatcccaacactgtgggaggctgaggtgggaggatcacttgagcccaggagtttgagaccagccttagcaacacagtgagacctggtctctacaaaaaataaaataattagttgagcgttgtcaactagtagtcccagctacttgggaggctgaggtgagaggaaggctgcagtgagccatgatcctgccactgcactccagcctgggtgtcaaaatgagatattgtctcaaaaacgaaagcaaaaacacacaaaaaaagcattccaaagtggagaagttacggtttcacttatataggcagagacatacaatccttacagtgacttgactagctataggatgctaccttccaaggaagattgctttattactctgtgaggggtgtacccgtctgaggaagtcttatctctgccctgtttggtcttagttatttctagggtaaaaggggcagaaggtacagctgctcgccatgtgattcatgctgcataaccacattcctctcaagtttcaggatcatttacaattccaacagcagctgggcgtggtggctggtgcctgtagtcccagtaccagggatgttgaggctggaggattgcctcagcccagtagtttgaggctgcagtgagctatgattgcatcactgcacaccaaccctgcctctaaaaaataataatatcaacaataaagttccaacagctttaagtttgaattatttaattccacaactcatttatcaacatatgttgcagataactcatggggagtttaaaatactcatagtattgtcacaggttataggtttttctgattacgtattgctgttaatgaattatcccatatctttttgttgctgttgttagagacagggtcttgctatgttgctcaggctggcctctgattcctgggctcaagtgatcctcctgtttcaccctcccaagtactgtcactaaacctggctaattgcttcatatcttttttattttttttttccccttagagacagggtctctatagacagagatcctctgtctatagaggatctatgagcaaggtggctcatgcctataatcccagcactttgggaggctgaggtgggtggatcacctgaggtgagaagtttgagaccagccttgccaacattgcgaaaccccgtctctactaaaaaaatacaaaaattagccaggtgtggtggcgcacgcctgtagtcccagctactcaggaggctgaggcaggagaatcgcttgaacccaggagttggaggttgcagtgagacgagatcgcaccattgcactccagcttgggcaacagagtgagactctgtctagacaaagaaaataaactaaaaaaaaaaaaaaaaaagaaaattacaattaaattacaattacaactggaaagcagttgggagatttcctgaagaacttaaaacagaactaccattagacccagcaatcccattactgggtatatacccaaaggaatataagttgttctaccataaagacaaatgcatgcatatattcattgaggcactactcacaatagcagagacatggaaccaacctacatgcccacaaatggtggactggataaagaaaatatggtccacatacaccatggaacactacacagccataaaaaaagaacaagactggccaggcgtggtggctcatgcctgtaatcccagcactttgggaggctaagatgggcggatcacgaggtcaggagatcgagaccatcctggttaacacggtgaaaccccgcctctactaaaaatacaaaaaattagctgggtgtggtggcaggcgcctgtagtgccagctactcgggaggctgaggcaagagaatggcgtgcctgggggacagagcgaactccgtctcaaaaaaaaaaaaaaaaagaaacaacaagaccatgtcctttgcagcaacatagatgcagctggaggccattatcctaaacaaactaatgcaggaacagaaaaccaaatactgcatgttctcacgtataagtgggagctaaacattgagcacacatggacataaagaagggaatgacaggtgccaggcgcagtggctcacgcctgtaataccagcattttgggaggccgaggcgggtggatcacttgaggtcaggagttcaagaccagcctggccaacatggtgaaacccagtctctactaaaaatacaaaaaaaaaaaaaaaaaaaaaaaaaaatggccgggtgcggtggctcacatctgtaatcccagcactttgggaggccaaggtggatggatcgcctgaggtggggagttcgagaccagcctgaccaacatggacaaaccccgtctctactaaaaaaaaaattacaaaattagccagacatagtggtgcatgcctgtaatcccacctactagggaggctgaggcaggagaatcgcttgaacccgggaggcggaggttgaggtgagccgagatcgtgccattgcactccagcctgggcaacaagagtgaaactctgtctcaagaaaaaaaaaaaaaaaaccaccacaacaaccaaccaaccaaacaaacaaaaatttagcagggcgtggtggggtggacgcttataatcccagctatcaggaggctgaggcaggagaatcacttgaatctgggaggcggaggttgcagtgagctgagatcgcggccactgcactccagcctgggcgacagagcgagactctgtctcaaaaaaaaaaaaaaaaaaaaagggaataacaccagggcctacttgagggtggacctacttgagggtggaaggtacgaggagggtgaggatcggaaaaactacctattgggtactatgcttattacctggggaggaaataatctgtaacccaaatcccttgcgacatgcaatttacctatataacaaacttgcacatgtacccctgaacccaaaataaaagtaaaaaataataataataaaaataaagcgaagccccacggggcgagcatgaaatctgggagctcagccatttccctggaggtggctgggtgggcggtgggagtggacggggctgggcagtgactgctgccaaggcagggggctggcgcgagggacgggggtagggggctgggcaggcatcggtgtcgcctcgcagggaacagttgggtggcttccagcttatgccaggagtctcctcctcacccgcacatcgcggggctaggatgggatgtcgtggctgccaaatcctccgaggcaactcctgcctgggacggcctaccacaggatgggcctgagaatccggagcgcaggctcgggccgctaggacaccttcccccgcccgcggacccagccttccagcatcaccggggttcgcggaggagaaagaggaaaggcgtttggcctgccaaggccgccgtagcgagggggcggggcccggaagagcaggatggcggcgcgggacagtgacagcgaagaagatctggtcagctatgggaccgggctggagcctctggaagaaggtgcgggccgcgtgggccggcggagcctgtggaaaacaggccaagggcccaggattcgggccacaaaagcacaagtcggtgctggaccattgttagatcgttcccagcgctgggaacacggcgacgagggaggcgttagccgcgctctcggggtgctcaccttctgcagcgacagagagaggtttacagggacgggagacacaagcgtggccgaacaagggggcggcgagatagaaacaagaaaatgacggaatagctagtgtgagagcggggggtgctcaggcagtgtcttccccgagagaggacgtttgagctcagacttgaaaccgaggaagaaaacaaccatgagcaaatctggagggaaagcatttcaggcagaaggaacataaagtggcaaaggccctgaagtgggagccagtttaggaaattgaggggcaggcaggacgggtatggttgcagcagatgacagcgggggagacaggtagaaaagaatgtcagaggggctgacaggggctggatcttacttggtagggtaaagagtttggatcttgtactaagtgcaggattagggttagggttagggtcatgggaaattacacagggagggatatatatatgatttttagagacagggttttgctctgtttcccaggctggtcttgaactcctgacttcaagtgatcctctcgcttctgcctcccaaagtgcagggattacaggcttgagccactgtgctcggccaatttttaatgttattctatctttgatgttgagaatacactggttggggatgggtaagagtgaagcagggagattagcaaaaagaggtcaggagatgatggtggcatggatgggacagcagtggtggtggtgtgtagtggtctgggtggagatatattttgaaagcagagctgaccatacttgctggtggaatgtgggggtgaggggcaagatgaatcaaggttctctcctgtgtttctggtctgttccacttaacgacttgacttgttcagcaagttatgtattgagtgtccagtaagggctgttggctgtgctagccctgtagggaaggcagaggaagaatggtggaatcattgggccacaatttatttgcagacctcctgttggtgggggtcccctcccttttttcaccctgaccacatcctgccaggttgattgtacttctgggatatctccacttatgccccctttatttcctacaaacagttctggtggaaacttctgctggatactggcccttcttctaccctcggcttacaaaaggttgagaaaggggccaggcacagtggttcacacctgtaatcccagcactctgggaggctgaggtgggaggattgcttgaggtcaggagtttgagaccagcctgggcattgtagtgagactctgtctgtaacaaacaaacaaacaaacgaaacaaaaggctgagaaaggctagtcttccgaatgctttttatgtgtttgaagtcagctgttgcattttcttaagacatctctgttctacactcactatcccaagttctttttttatagagacagggtcttgctgtgttgaccatgctggtttcaaactcctgacctcaagcgatgctctcaccttggcttcccaaagtgctggattgcatgcatgagccacagtgcccaacattttttattttaaaaatagagatgaggccgggcgtggtggctcacgcctgtaatcccagcactttgggaggccgaggcgggcagatcgcgaattcagaagatcctaaccatcctggctaacacggtgaaaccccgtctctactaaaaatacaaaaaaaaattagctgggcgtggtgggggggggctcatgtagtcccagctactcgggaggctgaggcgggagaatggcgtgagactgggaggcagagcttgcagtgagccaagatggcgccactgcactccagcctgggcgacagagcgagactctgtctcaaaaaaaaaaaaaaaaaaaatagagatgggatccttctatgttgctcaggctggtcttgaactcctggcctcaagtagtcttcccagctcagcttcttaaagtgttggaattataggcgtgactctctacgcctggccccaaccatgtttttgttttttttttttttctgtgacagagtcacgctctgttgtccaggctggagtgcagtggcgcgatctcggctcactgcaacctccgccttccaggttcaagcgattctcctgcctcagcctctcaagtagctgggattataggtacattccactacgcctggctaatttttgtatttttagtagagacagggtttcgccatattggccaggctggtcttgaagtccttaggtcaagcaatccatctgccttcacctcccaaagtgttggaattacaggcgtgagccattgcatgtggcccccaaccttgcttttgaagtggaaggaaaggacatggatttgtagactttgtttttctggactaaaaacattctttaacttctcagtaatacaagtttttgaggattgattcattgtcttctaagcacttttttttgagagtttcgctcttgtcacccaggctggcatgcaatggtgcgatctcggctcactacaacctctgcctcccaggttcaagagattctccagcctcagcctcccgagtggctgggattataggtgcccaccaccatgcccggctaatttttatatttttagtagacacagggttttaccacgttggccaggctggactcgaacttctgacctcaggtgatctgcctgcctcggcctcccaaagtgctgggattacaggcgtgagccaccatgcccagccagttttctaagcactttgaaatttaaatgcactctgtctgtattttacgatataacacactagactaataattatttttactccctgctttgaagttttagtgacaggttagacaggcattggtagaggagaactccattttaattaaagttgctggccctgacagaaaggtttattagttaagagttaaccagggagcctagtgacagtggctgaactttatagacacataggccttctaatctggaaagaagggggccagatacttacctattctttccttagacacttccacttggttctagaattcttatctacagctcattctatacccagattaattttagggccaattttctcctccttgatgctgtgactctcacacttaaaactaaccgtggcttccctcgcccccaggacacactataaaccctgcagcactatgttcaaggccccctgcactgtccgcctttctggttccatcttccgctcattccttggcctcccgttagactggactttctcaatacacctgaccttgccctttttttttttttctttttttttttgagatggagtcttgctctgcctcccaggctggagtgcaatggcacgatctttgctcactgcaaccaccgcctcccaggttcaagcgattctcctgcctcagcctcttgagtagctgagcttacaggcgcatgccaccacgcccggctaatttttgtatttttagtagaggcggggtttcacaatgttggccaggctggtcttgaactcctgacctcaggtgatccgcccgcctcggcctcccaaagtgctggaattacaggcgtgggccactgtgcccagcgactttgcccttttatccctccttctgtttactggtgggagtcagtggctctgtgtccctatctgcagctatcaaaattctgcttattcctaacggtggctgatgttgcagaccttctcattgtcagaagtgctccagtacgtgcaggtcttctctgctgggctcggagtgtcctgagaacgggagcagagttttgttcagttttctataccccagctctagaagggctgcttgcatggcaaggccctcatcaactttttgtttttgtttttgagacagtcttgctttatcccccaggcgggagtacagtggcatgattatggctcactgcagccttggcctcctgggctcaagcgatcctcccagctcagcaccccccagcccccagtaaccaggactataggcgcataccaccatgcccggctaattttaaacattgcgtcactatgttgcccaggtttgtctcaaaccactgcttctaatgactcgaaccactcctacctgggcctctcaaagtgctgggattacaggtgtgagccactgcacctgactcccccaccctttaaaaaaaatgtaaccattagccaaccaggggctcgttgaaattttggtcagggaatgagaggaaggaacagtataggaggcatctctggcttggagacagagctgagatctggtttcacctttgtgcttattagcagtgagtctcagggaagttacttaatcagtatccttatcagggtatgataaatgagatgatatgtactaaaggaaggaattagttgtcattagtagcagtaattaggacatggcctggctaaaatgccacccacctcctttctggagttgttccgtcactggttagaggtggtgccttctgctcaggagacctgtgggagctagttggccacattgcttggccctcatcatctgccgccacaggttgcactcagttgtctgcagatcttatctcccctttgagatcagaagcaccaagaatagcaccaagcactggcagcacctgttccctcttaccgtagcccagtgggacagttggcaatgcctggagacctttttggttgtcatgcctgtggggcataagctgctgctataggcccaggatgctgctgaacatcctgcaatgtacagaacattcccctgcaacaaagaattctccagcacaaaatatgctgagattgagaagctctgccatagccaagaatgatgccaagtgcatatatgtaatgtagtgtgtgtactgcatttccatgaaatggtgaacatcttgggttgtgggacccaagttgtaatttagtcctttagagggaaaagacattgtagctgatattaactgatttcccccatggccagggactgtgctcagctgtttacgtatgatatttaatcctcgttaccaccctacaaagatgggcttctttattaccttgattttacagttgtggaggctgaggcttagagtgatgaagtaacttgttcaagatgacaaattttttttctttttttgagacagaatctcactctgtcacccaggctagagtgcaatggcatgatcttggctcactgcaacctcctcctcctaggttcaagcgattcatctgcctcagcctcccgagtagttctgcctgccaccatgcctggctaattttttgtatcttagcagagacggggtttcaccctgttggccaggctgttctcaaactcctgacctcaggtgatccacccgcctcagcctctcaaagtgctgggattacaggcatgagtcattgcgccaggctgatgacaaatcttaacaagtagtagaaggggatttgaattcagatctctaggtctttaaacctgggctcttggctggacgcggtcgctcacacctgtaatcccagctacttgggaggctgaggcaggagaaccacttgagcccaggaagcagaagttgcagtgagccaagatcatgccactgcactccagcatgggtgacagagactgcatctcaaaaaaaaaaaataaataaagtatttcttgtgtctccctcttcttgttaagtacttcataggcatttaatttgcataacaactccatgaaatagctgttaccattaatgccatttctattttacagataagtaaattgaggcacagagagtcaaggctgaccaaagtccagcactagtaaagggagttggcttgaaactccactgtgactctcacccttaactcatacccttaaccactgtataacctacttcctcttgtgaacttttgaaaataacttgattttttttattttttaaaaaaatttaaataaattcaggattttgaattgtagttgataaaacgaggcagtaatttgtgccatagtacctgggagtttaaacctaaggaattgttaggctaggcctaaaatgtattagattaaattcccttgcttgtgtgatgtctcaacccagccctttcaacaaagtaggaaaaggaataggtttaaagaacactgtggaatcaggagattcacagaaattaaggaaactcttaggagtcggggaaaataggcaataccaaaggaaaaatgccggattcagggatggtgtgacgttctagaagaggtatggaagtgtatctctccttgccaagtgccaccccagcttctgcgcccttcatttgaagccaggagatttcagtttcatctgtcggaactctcctgacattataatttttttttttttttttgggggagaagtctcgctgtgtctcccatgctggagtgcagtggtgtgatctcggctcactgcaacctccacctctcgggttcaagcgattctcctgcctcagcctcctaagtagctgggattacagacgtctgccaccacgcccggttaatttttgtatttgttagtagagccgggattttgccatgttgaccaggttttgtaatggaatttagtgggaaaagagggcaatcattattacataagcttataaaatatattgttttctaggctatataaagcagtaaagtctaggaataacaatttaaatgattatatttgaattataagaagtaaacaatttatgatatttaaaaagtgacattttccctaaatttgaaccgaccatctcctctctttttcatttaaaaaactttttttttttttttttttaggtgaaagaccaaagaaaccaatccctcttcaggatcagactgtcagagatgaaaaaggaaggtataaacgattccacggggcctttagtggaggtttctctgctggatacttcaatactgttggctcaaaagaaggtatcattttcctaattgtagctattataccattaaagcaaatgatcaaaatattgattctccctcacccttgctttttttttttttaattttgagacaagagtctcgctctgtcgcccaggctggagtgctgttgtgtgatcttggcttactgcaacctccgcctcctggattaagcgattctcctgcctcagccttccaattagctgggataacaggcgcatgccactatgcctggctaatttaaaaaaaaatacttttagtagagacaggagtttcaccatgttggccaggctggtctcaaagtcttgaccttgagtgatctgcccaccttggcctccaaaagtgctgggattgcaggtgtgagccactgcacccggccacctttgcttttttttttttttttgcgatggagtcttgcactgttgcccaggctggagggcagtggtgtgatcttggctcactgcaacctccgcctcccgggttcaagcgattctcctgcctcagcctcccaagtaggtggaattacaggcgcctgccaccatgcccagctaattttttttgtgtttatagagacagggtttcactatgttggccagtgtggtctctaactcctggcctcaagtgatccgcctgtcttggcctcccaaagtgctgggattacaggtgtgagccactgcgctcagctttctctgaacatacactgtaacctcttgtgttctttggatatttggatgtttccagagtcaacttgtatcttgttcattgattgcaaccttatggttaaagagttttctttcactttgtaaaaaaatgcatacctcctaatcagatgattaaatgataataatgactttggtttttattgtgtcttgccattcacgaaatactcttaaacagagtctttcagttaatcattgactgtctctcgtgactgagtgagtgaggagggcaggtgtcacagggatcttgcagatgatgccaccaagggtcagagaggttaaggagccagcatggcgttagtgctgagggaagagtcaccaggtgccctcttcagacactggggaccacagcaagactggctcctcagtgctctctacctggggaaaagtcagttaaatcttttatgttatgtacttttataaatgccaagttgtttaaagtattgtatgttttaagatatattaatctagaagcatttttttgaactggaagaaatggctttctatatctcagttatgaatggaagatgaactgattttattatatgtgctgccatagtgagcacggaagatgaactgattaattcacatagcaattatcaagaaaaagatgggctagatcttttataatttttttttttttttcctgagatgtagtctcactctgtcgcccaggctggagtgcaatggcatgacctcggctcacttcaacctccgcctcctgggttcaagcaattctcctgcctcagcctcccgagtagctaggactacaggtgcccgccaccacacccggctgatttttgtattttagtagagatggggtttcaccatgttgttcaggctggtctcgaactcctgacctcaagtgttccacccgcctcagcttccccaagtgctgggattacaggcgtgagccaccatgcccggccttaccattttatttaattaattgatttattttttgagacagggtctcactctgtcgcccaggctttagtgcagtggtgcacctactgagagtagaccttccccagatgcctcagctcacagggcccttggagagaatcaggaaggaggtgcaaccctcttagagaaaactaaacaactttatgtgcagaggttacagacatatgtgacctccagagcattccctgtttgtggacgtggcacatgctcggtaaccgtggtcagggaacaaggccattggttacaggattccagtgtctgttgaaactgggggactggcagagccgctgcccttggacctgccaggttgagtctttggtcagggtactgtgaatgttgcctggattccttctgttactctctctttatccactctgactgattaaaacaccttgacatcatatctttacacttgatcttagccaaaaggcctagaagcgatgacatcatttctttagatatgttaatatgccagtggaggttgctggtctcacgtcctgcattttaaggtgaccttgcatctgtcagctcagatctgcttgtgttcatttcacagtttaactttcaatgtgtaattctatatctcttggtttcactttcttatggggaaaccttaatgtatccactaagttttacatcaggggatacagggattaataagaaatttatgtggaataattacgtctatataagcactgagatgggaagtagctaagagtttatagttattgggaatttcaagtccatacatgttatttaatcatttactcatagacccaaatactctctaggattgtaaagttctaaactctttttttttcaggatggacaccctctacctttgtgtcttcacgacagaacagagcagacaaatctgttcttggtcctgaagattttatggatgaagaggtgcgtgtgcaaaactttaattgccaattagctggtgggacaggtctagttggttgctgtaactgccttctctctccccagaaggtccaatgtacgatttcctctttgtttgtaaggctttatcttttaggtatttgatgtgcagtgtcctgtacatcagtagagtcttgttcattggaggagcattttatactggggccaatttctaaaatcaagagtgtaaggggaaagtcatatacaggcaatttacttgaaaagcctcgtggctgggtgcggtggctcacgcctgtaatcccagcactttgggaggccgagacaggcggatcacgaggtcaggagatcaagaccatcctggctaacacggtgaaaccccgtctctactaaacaaaatacaaaaaattagccgggtgtggtggcgggtgcctgtagtcccagctactcgggaggctgaggcaggagaatggcgtgaacccaggaggcagagcttgcagtgagctgagattgcgccactgcactccagcctgggcgacagagcaagactccgtctcaaaaaaaaaaaaaaaaaaaaaaaaagtaaagcctctattgcctcaaaagctcagtatccatggtgctgggtctgcagctttccacagtaactctcaggcacactgcagtaaagaactgtgagtgactgaactaaaattaaacttctgctaccttaaaacctggtcgcggattcacccatgataaagattaaatagggagggagagcatcaggaagaatagctaatgcatgctgggcttaatacctaggtgatgggttgatctgtgcagcaaacctccatgacacacatttacctgtgtaacaaacctgcacatcctgcacatgtaccctggaacttaaaagttgaaggaaaaaaaagattaaataaaacatttatatcagcatgtgcgaggctgcaggtaagagggaaggaagtctcattctttttttgagtagcatcatctagaaggaaacatatctcatgtagcaagaagtctagatgtgctgagaccccaggctctctcttctcagtcttctgttggcagcttgtccttatactacctctcctcatgattgcaaaatggctgtagtagttccaggtggcacatccaggatgacgttgttcaagagaactttcctcttggtcccttttcttttcttttttttttttcctgagacggagttttgctctgttgcccaggctggagtgcagtggcgctatctcggctcactgcaacctctgcttgccaggttcaagtgattctcctgcctcagcttcccccgagtagctgggattacaggcgtgtgcaccaccatgcctggctaatttttgtatttttagtagagacggggtttcaccatattggccaggctggtctcggactcctgacctcaggtgatccacccacctcggcctcccaaagtgctgggattacaggtgtgagccaccgcacccggcagtctcttttcttaaaagcaaagtagcctttcatatgagtcctaccatgaattttctctacatttgcttgcacaaattgttttacatgcccattcctaacgcagtccctggcaaggaaagtgggatcaaaatgactggcttagataagacacaaagccccacttcataatcctgcctccccaacactgggagtaccactcctgcaatgtgtggcggtgcagaggaaggcaggtgcctagacaacgtcaggactctgcaaggaaagaggaaacgtgccaatggttggacaggcagccagcaacatctgctccagtaaaggcaaaggcacctgactctaggcctggcactcacacttgtgaatgcttgctggctggaactccaggctttgtctctttcacgctgacctttgagatactgtcgagaagaacacggccattacttcctgtcttcccagcttggtcatgctcggggtggccctaatgagcagcgactatcatgccctgcccttggccactggctttaccttgtgtgaggatgaggttctaaagtcagtgtgaggcggggcacggtggctcatgcctgtaatcccagcactttgggaggctgaggcgggtggatcacctgaggtcaggagttcgagaccagcctgaccaacatagtgaaaccccatctatactaaaaacaaacagctagccaggcatggtggtgtgtgcctgtaatcccagctacttgggaggctgaggcaggagaatcacttgaacccgggaggcggaggttgcagtgagcccagattgcaccactgcactccggcctgggcaacaagagagaaactctgtctcaaaaaaataaataaataaaaaataaagtcagtgtgtatgtctgtcactctgctgatccagaactaaattttgtagttttaactttttttttttaacagaaataaaactatgtgatgtattgtgtatagtcactttccaaataatgtaattctgtttgaatttttttgaaggatcttagtgaatttgggatagcacctaaagcgattgtcaccacagacgattttgcctccaaaaccaaagacagaatacgagaaaaggctaggcagttggccgctgctactgcccctattcctggagccaccctccttgatgacctcataacgccagcaaagtgagcatttccttctgactgtcatgatcttagcaccggtgttttgcatatgtgtgattctcttgctgagggatagtttgattgcaagtgagacaagccttcttaggctcaaagtctaagtgaaaaagggggttttgcgtaaaggatcttgcactgtcattgcacggagagattaagaactccagccactagctgtgctgctggggctctcagaggctggagagctgttaggaattacagtgacttctcccaccacccctccagaccttatagcctcgcctctgtctgcctccttctaccctcactttctgtgtatctccttgtgctcctgggcttgtggcctgatatggcagccttagaccttcagggattcccaggccacatgcttagcaaagactgtctagagtccctgtgatcccatcgtaaaggcccaggagaaaggtcatctgattgacttccccagttcaggtgtgcaccccagtgcagcctgctgtggctggaatggcagggtcacgccagatgtaatgtgggtgagggcaagggcccaggcaagacaggcctaggaactgagcaggaactcagaagccgcttatttcatattctttgttaatgttattttgaaaagttcattttcaatgccttgctatcctagattatctgttggtttcgaattgctaagaaaaatgggttggaaagaaggacaaggagttggtcctcgagtaaagagacggccacgccgacagaaacctggtgtgtatgttaattgattaactgttatcactgctgcagcgtactttttttttttttttgagacagggtcttgctctgtcgcccaggctggagtgcagtggtgcgatcccggcatactgcagccttgacctcccgggctcaagtgatccttccacgttagccccgcaagtagctgggaccacaggcatgtgccactgcgccaggctaattttttgtattttttgtagagacggggttttgccatgttgcccaggcccaggctgaggattgcctgagcaaattccaataaacgaaatagctgggcccagtggtatgtgtgtcttctaaggctttttatgtgtaatgcatgacagcttccagaaaggctgtgctagtttatgcttctgccagcagcatgtgagagttcatgtttcctaccctcccccaagctgtcacagtttaacattattacttgttccttatttcttgccctgagtctccccagccagactgtaagtgactctttgagggtaacagtcatttcttttgggttccttatgctgtggggcagtattggttactcattgagcacattactgctaggtagggcaggtgctggtagaaaatgattcctggctgggtgcagtgactcatacccataatcctggcactttgggatgctgaggtgagattatctttgagcccaggtgtttgagaccagcctgggcaacacggtgaaaccctgcctctaccaaatataccaaaattagccaggtgtggtggagcgcacctgtagtcccagctacgactcaggagagtgaggtgggaggatggctttagtccagaaggttgaggctacagtgagctatgatcatgccactgtacttcagcctgggtgacagggcgagaccctgtttctaaaacaattcccagttatcttcctctcaccgtaatgctgtagcacattttataaatgtacccatgtacctctgaagagttatcagtgaggtttttttttttttttttttttttgagatggagtttcgctcttgttgcccaggctgaagtacaatgcgcgatctcggctcactgcaacctctgcttcccggttcaagcgattctcctgcctcagcctcctgagtagctgggattacaggcttgcgccaccatgcctggctattttttttgtattttttgtagagacggggtttctccatgttggtcaggctggtctccaactcccgaccttgtgatccaccccgcctcagcctcccaaagtactgggattacaggcatgagccgctgcgcccagcctttttttttttaaattttttgtggaggcggaatctcactatgttacccaggctggtcttgaactcctgggctcaagcgatcctctcacctcagcctcccagagtgctgggattacaggtgtgatccaccgcgcccggcctggtcggggttttctatttgtagtcactcatgactattgcatttgaaatctcttttctagatcctggagtcaaaatctatggctgtgcattaccccctggaagctcggaaggatctgaggtattgcatggtgtgactgaccttcactttggtacaacagcacctgtttctgtatgactgtgaaatttggttggagacaattttagaaatcagatccaataactatacagttaaatactcataccctaaagctatcctcattatatcagcatacatattcagcaacatgccagcaccacagatacccaggtctgttcagcttcataaaatggagttggtgttagcatcctttgtgccagaaagtgatttagtcatttataacagcaccaatgaaagtttgctaattgttctgtgtggcattaatcactgcgttttcaattagtattttgtgggtttactttgcatccttcagtgactcaccttaattccactttaaacggaaatagggtgaagatgatgactacttgcctgataatgtgacctttgcacccaaagatgtcacacctgtggatttcacacctaaagataatgtgcatggtctagcttacaagggcctggatccccaccaggcactgtttggaacttcgggagaacattttaatcttttcagtggtggttctgagagagctggcgatcttggagaaattggactgaataaaggaagaaaattgggaatttcaggccaggtaaaattattttctattttataaagggggagtcattgataaatgagtctactttctttctttcttctttttagaggttctttattttctttttttttccccctaatcctcaagtggaatcaggtcaaagattctttcttaaaatgcatttttaaaatggtgactttgccatttcattattaccatttctgtttttttttgagacggggtttcgctctgttacccaggctggagtgcagtggtgcgatcttggcttactgcaacctctgtctcctgggttcaagtgattctcctgcctcagcctcctgaatagctgggattataggcatgtgccaccatgccccactaatttttgtatttttagtagagacggggtttcaccatgttggccaggctggtctcgaactcctgacttcagatgatccacctgcctcggcctcccaaagtgctaggattacaggcatgagccactgcgcctggccaccttttctttctttctttctttcttttttttttgagacagagtttgactcttgttgcccaggctggagtgcaatggcgcgatctcggctcaccgcaacctccacctcccgggttgaagcgattctcctgcctcagccacctgactagctgagattacaggcatgcgccaccaccccggctaattttgtatttttagtagagatggggtttctccatgttggtcaggctggtcttgaactcctgacctcaggtgatccacccgcctcggcctcccaaagtgctgggattacaggcgtgagccactgcgcccggcccaccttttctttttataaacgtgtttttttttcagtcttttaaacaaaaatgctacttgttagaggctcctttccgcagagagtaggagttcttccagcgggcagtagagtagcagcggcccttagaccccagccaccagcgttggcccaggccgcattgatcagttgatgaacatttcttcctttctcctcttggaagccacatttccacccctgcactgctgcttggctttgttctccactcctcttcctgtgctgggacctggagccatggctgttgtggggactggagggcagtgttggcagtagggacatggcattcacctctggtcactgttttccagaaaacttgtgtgtgtgttggtcgatctgggacccccgttcacttctctcttggtgatcttgaagtgctaacatggtttccaatcacatccttaaagtagctttatccctgaagatcccagacataccctaacacctgtgctcagtttgaaaccttgtttttttaaaggcttttggtgtaggtgccctggaagaggaagatgatgatatctatgccacagaaactctatccaagtatgacactgttctgaaggacgaggagcctggagacggactctatggctggacagcacccaggcagtataaaaaccagaaaggtaattcgacagccacaaacctaatggcaggaccaagtgtcagggtatcaggaaggaggggctgcaagagcgatacaggagcaccagcctctgttgttggtcaaagtcacggtaagaaacaaaacaaagaagcgaggcccagcatgggaagtgaaacaaatgcaggattcagacctggccaaggccaaagccagctgtcaaggtggggcccaggtgggagggagggagaggtctgtaatcagggaaagaggaatgcctggaccagtgaccacatggctggtcagagctggcagtgggtcaaagggaagcacccagagctcgaggaactgggcaggtggccaaaggaggccaacacatgcagcaggtcagaaggtcaagccaggggaccaggaggcaggtacaccaacagcctgcagcaagatggagctgggcgcccagtccgtcttctcccttgagtccctggctctgaggaggctcttgttgggataagaggctgacatctctcaacacaactttaacttcatgctgtgttgaaatttcaaggtgaatcagatcctgtggtttgaagtcacatttcagttgtttccagaaaaggtgcagggccagacagtgtagagtcggtattagcagcatgtgatttggagtcagtcagacctgggtttggatgccagctctccattgcccagctttgtgaccttaggcaaggctcataacctctctgggcattggagtccacatttgtaaagtgaggataaaatccactccagaggtggttgtgaggattaagtggcataactcagtgtctggcaaagcacctgtcccaaagactgaagaagtggcacctactattctttggttatcatacagtcatgtgtcacttgactgggatggtatgacagggaacccagggttttacacaggacactggaagggcatgtgtacccagtgttaggagacttaacctccgggtggtcagtgggctgctagtacttacttccttttttttttccttccaatgtttttctttttttttcccctgagtcatttagcttctgagccttcttccttttgcctccctatagtttctgatttctgtccccaaactatggattatttttatataacttaaatgaagatatattaatatatcataatatactatttaattttaatactatattataatcaatataccattatatattgtatatgatttatattttatataattaatatatcaatactattggtatattatgtaacataccaatacattattacatagtaatgtattgatctattttaattattcattatttattaaaagtggtgggagtatgaaattgataatatcctatatctgttaatataaatgatatttaatatacaacatattaataacaatatatcaatcctttaataattaatgatatgtaatgacatatatttaagtccgcctgctgaaccacatctttcacttttccctcgtgcaccagctttgcccccagctgattggttctcactccttccactgagctccgagcctgtccttgtccctctctgctgtggcctctctcccccagcttcctctctccccccctgcagggtcacagcatctgtagttttgactgtatgattttctattcggtgaatctatctttattttacctagtctccacggttgattttttacatttttaaattttttttttttgagacagagtctcactctgtcacccaggctggagagcagtggcatgatctcggctcactgcaacctccgtcccccgggttcaagcgattctcttgcctcagcctcctgagtaactgggattacaggtgtgcaccaccacgcccagctaatttttttttttttttttttttgaagaaggaatttccctcttgttgcccaggctggagtgtaatggcctgatcttggctcaccacagcctatgcctcccgggttcaagcaattctcctgcctcagcctcccaaggagctgggattacaggcgcctgctaccacgcccagctaatttttgtgtttttagtagagatggagtttcatcatgttggccaggctggtcttgaactcccgacctcaggtgatccgcccgcctcggcctcccagagtgctggaattacaggcgtgagctaccatggctggccatggttgatttttaaattctcattttttttttccatgatcaatagggctataatgaatatttttctgattctgtctttatgtacatttgtttatttcttcagaattcttcagaatgaactcataaacatgaaatttctgggttttgagataatacaagttccaagaatgtgaaattgaatcccacattacctgaagaaattttagtaagttctagaagctttaaaaaaagcccaacatgccaggtgcattggcttacacctgtaatcccagcactttgggaggctgaggcaggcagatcacgaggtcaggagatcgagaccatcctggccaacatggtaaaacctcgtctctactaaaaatacaaaaattagctgggtgtggtggcacatgcctgtaatgccagctactcgggaggctgaggcacgagaatcacttgaacccaggaggcagaggttgcagtgagccaagattgtgccactgtactctagcctggtgacagagcgagactccatctcaaaaaaaaaaaaaaaaaaaaaaagcccaacaggagtcaaagcacaaagaatggttttgtggggaggggagagatgtggtggtgctgaatgatgagtggctaaaagccttagctcatctgcactgcttgctgttcctgcttcaggcctgagctcctagcctgtgaaagagcttttgatggtcatgtagaaggggctttttttttttttcagaaggggcttttgagtgcagagaatacagttcatttatacggacttttggcgtaaccagtacgtgcaggaaaaccttgagaatcaaatcaaagagcttttgttggtggggttgtctctatgaccagaagacgatccccacctccaggtcagagggcattggtcattcagtttcctatgtctgtgatctttatgtcttgttaaagattacaggctgacctggtggcattgcctttcatccctatttggattgttgctaaggagatggccaggtagtcaccctgtagttcttcacctagttttacacatgacgctctcacagttgtgatttgtattttcctccatgcttgtccttttggtggtttttcttgatcttttactccacggggtatatcctttggtgcccctaaggtacttcttctaaaaatcacgtcaatatgcttgtcttggaggaccacagccttgtgacctgggtagcccaatctgtccagggcggtgtgggccgggccttagtcactgagtcaacagaggtgtggggctttgcttaccacttgttcttccctttactgctgctgttgagtgatagcatgtatgacacgtactatttatgttcttagagataagaacgtaaaatgctgatgtgttctgtcttattctaatcatctctacttctggaattaatctatgacatcattttgtagaatcagagaaagaccttcggtacgttggcaaaattttggatggattttccttggcttctaaacctttatcttctaagaaagtaagaaaaactttttttctttctttttttactggtttagttcttaaaatatttgctgctatgtgatctgagttctattaacaacaggaaagataagtaaattctgttttcaaaaaacaacagcctggttactagtgattgtctagaaaaacattctacattagaaataccagggcgaggcgcagtggctcatacctgtaatcccagcactttgggaggccaaggtgggtggatcacctgaggtcgggagtttaagaccagcctgaccaacatggagaaaccccgtctctactaaaaatacaaaattagccgcacgtggtgtcgcatgcctgtaatcccagctactagggaggctgaggtgggagaatcacttgaacccaggaggtggaggttacagtgagccaagatcacaccactgcactccagcctggacaacacgtaaaactctgtctcaaaaaaaaaaaaaaaaaatcagttggccaggcgtggtggctcacgcctgtaatcccagcactttgggaggccaaggttggcagatcacctgaggttaggagtttgagaccaccctggtcaatatggcaaaaccccatctctactaaaaatacaaaaattagctaggtgtggtggtgggcgcctgtaatcccagttactcgggaggctgaggcagggagaattgcttgaacctgggtggcagaggttgcagcgagccaagatcgcaccattgcactccagcttgggcgacaagagcaaaactccgtatcgaaaagaaaagaaaagaaatatcagtcagtagctacattgtgataaaaatatctaatttctatttttttttttttttttgagatggagtcttgttctgtcacccaggctgcagtgtagtgatgcaatctcagctcaccgcaacctccgcctcccaaattcaagcgattctcctgcctcatcctcctgagtagctgggattacaggcgtgcaccaccacggctggctaatctttgtatttttagtagagatggggtttcaccatgttggtcaggctggtcttgaactcctgaccttgtgatccgcctgcctcagcctcccaaagtgctggaattacaggcgtgagccaccgcgcccggccgctaatatttcaaattcaaacttcaagtgagtggttatttacatgaaaagagacatacattagaaagagaatgaaattgctatgattctaggggaaatgtaggttaaggaaaagtagaaaacattcagaaagctggataacccatagccctggttcctccccatgctctgaagctagcaggggcaaggttccctggcctcctcagctggggccgagcagaagggagagaagccgtgtgcaggtgggtgaagttggaggagagctctgcgtgcctttgcagattgctttgtttttgtgagatgctgtcacagccacatgtgaagctcttaggccacatggcgctcttcctgtcaccaccaaagtcacatgctcacaggcacactcaggagggagttagggtgctggccagcccaggaggggtgtctggccatctgccttgtcagcattcctgttttagattgtttcacgctttaatcagctttttgttttttattcagcaaacatttgttcagtacctctaaggattggcctgtgcttgtctgggacacgggaggccaggggacagttttgatttgtttcattgtgatagttcatgtgttgtgatagccagcagaatatatctaggacagtgtcgggcatacagtaagctgctattattaccagaaatgtcaaataacattaaaggaaaatgcaggtgttttacatgtatgaaaaggaagcataaggccgggcacggtggctcacacctataatcccaacactttgggaggctgaggcggatggatcacttgaggtcaggagttcgagaccaacctggccaacatggcgaaaccccacctctactaaaaatacaaaaattagccaggcatggtggtacgtgtctgtaaacccagctacttgggaggctgaggcaggagaattacttgagcctggaaggtggaggttgcagtgagccaagattgtgccactgcacgtctagcctgggtgacagagcaagactccatctcaaaaaaagaaaaaaaaagaaaaggaagcatagtttaaaaatgatggagaagcactcactggtccttaggataaataggccagcctggccccaggtagctcccatccaacaaaggtagcagatacacaaatacagagtcgtgggcaaacatccctaagtggagagacacagtcctgggggttcctggcgcttctctggagtagggctttgggcaggaacacttcagaggagggctgtgttcatctagcctttcacacacagatttagatggttctctagatctgaatctagaggtcaaacagaacaatgatttggcagacagacagagagaaatactttcaatccaagactgggcatggtggcttacgcctgtaatcctagcactttgggaggccaatgcgggcagatcgctagagtccaggagtttgagaccagcctgggcaacatggtgaaaccccatctctacaaaaaatacaaaaaaaaaaaaaaattagctgggtgtggtggtatgtgcctgtagtcctagcctcttgggggcctgaggtgggaggattgcttgagcctgggaggtccaggctgcagtgagctgtgattggctgctgcactccagcctgggcaacagagtgagaccctgtctcaaaaaaaagaaagaaatactttgaatcccatggaggatatagagaagttgtggacacactcctcctttctgccatgttcctctgggtttttgtgtggtggtaacatgagagtgttttctggctgatttgggggtgtgtctccagaaggtgatgaagctaagatgataaaaaaacaggatttcttgacaatgataacaccactctttcatggactttcattgtgccaggggcttgacccaggctgtgtattttaacaaccacctggggagcttggggaactccagttatagcagactctctggggtggggcgcaggcatcagtatagttacaactcctcaggcgagtccagcatgcacctggacctgagagccagcggagagaggggccgggagagaggggtcagtgctttcagccacagggttacttcatcatggacttcagctttcatgtagcttaaaaatctagagaatatttcagtgtgaatttgggggaaaaaaatagtaaagaaaagtctagaaaatagcttaaataacaaacacgtgtggatttgttagaccaagagcaagggagaccatttaatgcagttatttaacaatatttagtactttcctttaccttgtctgctgtgccatcattcatgcctgtcagtgttaaaaatccccaaatttcccaaacagattttcatttcacttccgtcaacttttaaattaaagtttttaaattcctgtccccactcccctcctagctcctgggccaggtcctcttggctctactcacattattcatagtaatatcttggatgaaaaaataggccaggcgtggtggcttacgcctgtaattccagcacattgggaggctgaggcgggtggatcatttgaggtcaggagtttgagaccagcctggccaacatggtgaaaccccgtctctactaaaaatacaaaaattagccaggcatggtgatgcgtgcctgtaattcctgctacttgggaggctgaggcaggagaattgcatacccagagctgagattgcaccactgcactgcagcctggatgacagagcaagactctgtctcaaaaaaaaaaaaaaaaagaaaaagaaaaaagaaagcccgaagcttcaatttgcaactgaaacataactagaaaaaataattatgaatttaaaaataactacagttattattattattaattattatttttgagatggagtctcactctgtcacccaggctggagtgcagtggtgcgatctcagctcactgcaacctctgcttcccaggctcaagcaattctcctgcctcagccttccaagtagctgggattacaggcatccaccaccacacctggctaatttttgtatttttagtagagacggggtttcaccatgttggccaggctggtcttgaactcttgaccttaagtgatctgcctaccttgtcctcccaaagtgctgggattataggcatgagccactgtgcccagctattattattatttatttgtctttcttttttttttgtttgagacggagtctcgctctgtttcagctctgcaccggggtgcagtggcgcaatctcagctcactgcgacctctgcctcccgggtttacgcgactctcctgcctcagcacccccgagtagctgagattacaggtgtgcgctaccacgcctggctaatttttgtatttttagtagagatggggtttcaccatattggccaggctggtcttgaactcctgatctcaggtgatccacccgccttggtctcccaacatgctgggattacaggcatgatccactgttcccggccccaactattatttaaaaaaattttttttttagttttatagagatggggtctcattctgttgcccaggctcgtcatgaactcccaggctcaagcagtcctcccatcttggcctcccagagtgctgggattataggtgtgagccactgcgcccagccattattttcctccatgctttgaatggtactttttctaaattttctgatgtacagtgggccagccctacctgtaggccctgacatttatgatctattgtcatctttatagttcttatcctataaaacaggcacattagcttctttctgtagaaatgggtgggaggatattcgaaatgcctgaccactggaacacggtggctcttgtgaccctccaggtccagaggggatgctggctggacctctggccagcctgttcttgtgctacctgcctgctgagtgttaacccgggaaggggcggggttaacaaggctcagaggtaacaggttttcctgattaaatcaaacatgatcttgcagcctgtattttctgggttttgtcttggtttgttaagatctatccacctccagagctgccaagagactatcgaccagtgcattatttcagacccatggtggccgccacctccgagaactcacacttactgcaggtattatcagagtcagctggaaaggcaacgcctgacccagggacacacagtaagcaccaactgaatgcctccaaacgggctgagttgcttggagagacgcctattcaaggtatgtgccatggagaagacggaaatcatttcacataattcgagttatcaaaatcaaaatggaaagttgttgttttcccactgaagttttttacatgaatttgtattcccaaactgtggaaataccactatttattgtaaatggcatacataatagtgtgcatatcttttacttctttttttaagttttatttttaaacttatttattttgagataatgtctaggtctgtcacccaggctgaaggcagtggtaactctctataacctggaactcctgggttcaagcgttcctcccacctcagactcccatgttgctgggactataggcatgtgccaccaccacacctggcacattttttaaatagagatgagggtctcactatgttgcccaggctggtctggaacttctggcttcccaaagtgctgggattacaggtgtgagcctctgcgcccagccaaggcttgtttttccaccttcagtttggttgatgtcattcaaatcacaacttttgttgtaagctcagctgttttcagacttgtcataattatcagggaatgtggttaaggtgccttccccttctctgcacagcctgggagagtatgttttcttcctcctggggatcgcattgtgtaactcttctcccgaaagtctgaaagggatgaatgtgtctgaaagtctggaaagacatggagaatcccctgcagggtgcagcaggaaagtcccaccatgagaggtggacttggactcttaggggctcgggtctcactgccatggggaactcaataggtgtctcgtataattggcaaacagaacccttggttccccacccccatcacacactgcgcttcctcatctaagtcttctcatctcaggaagtggtgccaccatgatccactgctcggaccaggatgtaggaggcctaattcttttttttttcttaatttttaatttttatttttttttattatactttaagttctagggtacatgtgcacaacgtgcaggtttgttacatgtgtatacatgtgccacgttcgtgtgctgcacctattaactcgtcatttacataaggtatatctcctaatgctatccctccccgcttccccgggaggcctaattcttagctcctctcttttcggtcctcccgcaccctccctgaccctccttggcccttagtgagtcctctcggctctacccacacgtgtgggggttctgtccactactcatctgcatttccgtggcctcccgggtctgagccccacccctccacctggaccgttgctgcagtctccttggtggtctccttgtttcctgtccatctcccgtagactgttcccctcaccagcagctggatgaggccaactataccagccaacacctctcccacctacagaaacctccaggctccccacgaggccctgtgcggccccgcccctgcccgcctttcaggctgcaccatccaccaccttcccttaccctcccacagtgtagcgtcttcctcctcctttcctcccctggaacacgccgtcatccatgacactgcctaagggcctttgtgtttgctgtacctccctttctgttcttccctcatatttttgtgaatctggctctttttttttttagcttatgacttatctcgaatgttactttcttccagccttccccgaccaccatataatctggttatctgcctgtcccctctaccagcccgctcacacaagcccccctcagtcacatcgtcctgtttttttcatagccctcctctattgagggccagcgtattgctcctgggcttctttcgtgtctccactgccctccaagctcctgggccaggtcctggcatagagctggcactcatgagtgtttgtcccattggtgagggcttgctggggagctgtactcggaaccagggctagtggtggtggactgcaggtctggagccggggatgtcaggttccccatcctggaatcactcacgtgccctgtaagtgtgcatgtattaacttccatttttgctgactataaaacaggaatcttggctggacacagtggctcatgcctgtagtcccagaactttgggaggccaaggtgggatgatctcttgagcccaggagttgagaccagcttgggaaacatggcgtaatcccgtctacaaaaaatacaaaaagtagtcgggcatggtggtgtgtacctgtggtcccagctactcaggaggctgaggtgggaggatcacttgagcctgagaggtggaggttgcagtgagccatgatcacaccaccgtactccagtccaggtgacacagcgagaccatgtctcaaaaaaaacataggaattggccaggcgtggtggctcacgcctgtaatcccagcactttgggaggccgaggcgggtggatcacctgaggtcaggagtttgagaccaacctggccgacatgatgagaccctgtctctactaaaaatataaaaaattagccaggcattgtggcacatgcctgtagtcccggctactcggtggggatgagacaggagaattgcttgaacccaggaggttgcagtgagctgagatggtaccattgcactccaggctgggcaatagagcgagactccatctaaaataataataataataagaagaagaatctcaatttttatcactgtctagtccacagggacatattaatataaatgaaacactaaacataaaatcctcatccccaattatgtaaatttgtgttattgaaatgtatgtacagagaaacgtaaatgtggttgtctcatggctcttttcatctcttctaattactgtttttatttaggttcagctacttcagtgttagaatttctgtcccaaaaagacaaagagagaatcaaagaaatgaagcaggcaactgacctgaaagcagctcagctcaaggccaggagtctggcccagaacgctcagagcagcagagcccagctctcccctgcagcggctgctgggcactgctcttggaacatggcattaggtggtgggacggccaccttaaaagccagcaacttcaagcctttcgccaaagatccggaaaagcaaaagcgatacgacgagttcttagtacacatgaaacagggtcagaaaggtgggtgctgggcctgggtgtcccaaatctcggcccgggcggggtcatattctcactgttctcatcctagacccatatttacagttgaggtatcctgttctgtcagtgtttttgctttatcctgctgcaaatagtgcaaaggtttcaggccttggctcttgacctcagaaagcaagaacagttggcttatgttcctccatatctcaggccaaagctagctgtttaagtagagaacacagctggcggtggccggtacttacaggccgtttggtgtttgcaagtgcttgactgctacaagcattgcattcacatttcatatcagcatcatcttccacctcatccgaagatcctaaccatccattcctgactcatagtctaaaatatgacttaaaacaatagttagctattgaaccgttacagagggaaaacaatcactttgtgatctgtgaagtaaatagggcaagaatgaggcaagaatgaggaaaggggttgctgttgtatgcagtagtcctcgtgagaggttatcagtaaattacagggttgttttttaaaaacagatctttgcggaatgtaaagtctatttactgtgccttaactctctactaagaacctacatcactaatgtttatttgctttaaaaaaaaaaaacggttagtgaaagagtgtttttctgccaaaacatagggatgtggttgaggtgaacttatcactgcctgggagtggtgacaagttccttactgctgaagatttaaccaaccattagcctctcaaatggttttctctgttatgtttggtagacagaattcaataaaagcatcattttggctggggatggtggctcatgcctgtaatccaagtactttgggaggctgagatgaggatcgctttagcctaggagttcaagaccagcctgggcaacatagtgagatcctgcctctaccaaaaaaaaaaagatatatatgtatatataaaatatattatatatatatatacacacatcatattttatttatttttttgaacggagtcttgctctgttgcccaggctggagtgcagtgtcaggatcttggctcactgcaatctcagctcactgcaacctccacctcccaggttcaagtgattatcctgcctcagccttctgagcagctgggactataggtatgtgccaccacgcctggtaattttttgtttcccgtctctactaaaaatacaaaaaattagccgggcatggtggcggacgcctgtagtcccagctactcgggagactgaggcaggagaatggtgtgaacgtgggaggcggagcttgcagtaagcagagatcatgccactgcactccagcctgggagacagagtgagactccatctcagaaaaaaaaaaaaaaaaaaaaagagagatggggtttcaccatgtttgccaggctggtcccgaactcctgacctcaagtgacccacccgcctcggcctcccaaagtgctgggattacaggcatgaacaactgcgcctggcctaaattttttttaaaaaagcacaattttgaaggaaacagcaatattacctgccaaatacctcaccattcccatagtcataaaaacaaggataaggacttatgaaatatacagggatacagtggtgcccagcagatgttctcttgtaagccccatgttttcctgaaaagtgaagctgcttcttgttctctgcccccgcagatgctctggaacgctgtctggaccccagcatgacagagtgggagcgaggccgtgagcgggatgagtttgcccgggcggccctgctgtacgcatcttcccattcgaccttgtcctccaggttcactcacgccaaggaggaggatgactcagatcaggttgaagtccctcgagaccaagaggtctgttgtcaccatgtcccttacctggtgaactttaatattaaagcactgcctagccaaaatagttttttccttttttttgagacggagtctctctctgtcgcccaggctagagtgcagtggtgtgatctcggctcactgcagcctccgcttcctgggttcaagcgattctcctgcctcagccttccaagtagctgggattacaggcgctcgccacaacagccatctaatttttgtatttttagtagagatggggtttcaccatattggccaggctggtcttgaactcctgacctcaggtgatccacccgcctcggcctctcaaagtactaggattacaggcatgagccaccatgcccggccgagccaaatatttttaatcccttggtgagaagatcaaaatatacatgtataggagaataggaaaccattttatgccttagtttccaatgtactggagcataaatgttatagcacaaacttttttcacagttctagaagattgcttgaaaattttaaatgggagagcagtcaggtcagtggtgcggccacttgatggaacagaatgcatgtctttttccagaatgatgtcggggataagcagtcggctgtgaagatgaagatgtttgggaagctcacccgagacacgtttgagtggcaccctgacaagcttctatgtaagagatttaatgtccctgacccttatccagagtaagttggataaacctttacatcagtacaaaatgtattcttgatattaaagctaattttccccttacatactcatataaattcttattttttctacatgaacttatttgcatatcactggatatacaaatctacacattttatagatttgctttgataaattacttctataatttgttactaaaacaaaatctggatagcaaactttattccatattgaagctatgaaactcagatatgtcaagttacaaaagcattatgcctctctcatttgccaccttcttgttgctgctcatgtggtttacatttataatgttacttatgtttttaaattatcattataaaagttaaacactttcttatttgattaataacacttcaagaggtggggtgtggtggtgcacacttgtaatcctagcttgggaggccaaggcaggaggatcgcttgagcccaggagttcgaggccagcccgggtaacatagtaagaccccatctctaaaaaatcaaacaaacaaacaaacaaacagaacacttcaagatagtaggccgggtgcaatggctcacgcctgtaatccctgtattttgggagactgaggcaggcagatcacttgaggtcaggagttcaagaccagcctgaccaacatggtgaaaccccgtctctactaaaaatacaaaaaattagctgggcgtggtggtgcgtgcctatagtcccagctatttgggaggctgatgcaggagaattgcttgaacctgggaggcggaggttgcagtgagccaagattgtgccattgcactctagcctgggtgacaaggcgagactcaatctcaagagaaaaaaaaacaaaacaaaaagatagcatatgtggtcaaaccagagactgtcagaaactttaggtatatttttatcagtggagcttttccttaatggaaatccattttgaaagttaaattcttgtccttatcataataaggaaaatctcatgggacctaaaatcagtcacccagattctcgaactgctttgagaagtgaaagcatcttaggagactttttagtcatgcagaagaggtggaaaacttgagatggaaagcttttcaggaggtggattttgtcctactggttgttactaaaatgattcttttttcaattcccagttcaactttagttggcttaccaagagtgaagcgtgacaagtactcagtcttcaactttctgacgctcccagagacagcttccttgcccaccactcaagcatcaagtgaaaaagtatcacagcaccgaggtcccgacagtgagtagggcgtccccggggtctctgattgaccagggcctcaacccctagcctgtaggaagacagaattaaagggtagtttagtcctaacaatgtgaatggtgcatattctccctccattgagggaattactcttactaataacttagctcatgttgtaatggtccagatgtttactctttggggttggggctctgtctctgcctctgccacctacctccccaggaccctacacagtgccaggcccctagtaggcacgctgacattctgagtgaatgaaagagcagtggtgaagaactggccttttccttgctaatgctggagtttatatctatgtcctgcctttcagaatcaagaaaaccatccagatgggatacctctaaacacgaaaagaaagaagattccattagtgaatttttaagtttggctagatcaaaagccgagccacctaaacaacagtccagccccttagtaaacaaagaggaagagcatgcaccagaattatccgcaaatcaggtatttggggcttccagattctctttgccacgctgagtgtggcccttgcttttctctttggtgacactttctcctcgtgactcaccagcagaggcagccaactattgatccatttccccttaaaggccatttggcttgtttctaacttttggctataacaagtaaagctgctgggagcattcatgtgcaagtttttgtgtgaatataagttttcatttctgtagagtacaaacctagtagtgggaatcctggaaaatatgtacatgtatatttaactttataagaagctgtcaaactgtattccaaagttatttttgccttatgtattttgaagtgcacttcttaggtgtatatacatttaggattgctatttctctctttttttttttttttttttttttgagatggagtcttggtctgtcccccaggctggagtgcagtggcatgatttcggctcactgcaagctctgcctcccctcccgggttcaagtgattctcctgcctcagcttcccaagtagatgggactacaggtgcgcaccaccatgcctggctaatttttgtatgtttagtagagatggggtttcaccatgttggccaggctggtcttgaactgggattgctatttcttttcagtgaattgatctttttttttttttctctgacaccggcttttactctgtgcccaggctggagtgcagtgttgtgataatggctcactgcaggctcgaacgcccaggttcaagcaatcctgcctcagcctcctgagtagttgggactgcgggcacacaccaccatgcctggctaatttttttttttttttttttttttttttttttcagagaaagggccttgctatgtttttccaggttggtctcaaacttctgctctcaagcagtcctcctgccctggcctcccaaagtgctgggattacaggcgtgagccaccatgcccagttgacccttttaacattatgtaatatcatctttatccctggtaattttctttagtgtttgcgtagtatatatctttttcatcttctttttaacacatctgtttcattatatttaaagtgggtttctttttttttttttgagatgaagttttactcttcttgcccaggctggagtacaatggcactgtctcggctcaccgcaacctctgcctcccgggttcaagcaattcccctgcctcagcctcctgagtagctgggattacaggcaggcaccaccatgcctggctaattttgtatttttagtagagacggggtttctccatgttggtcaggctggtcttaaactcttgaccttaggtgatctgcccgcctcagcctccccaaagtgctgggattacaggcataagccaccgcgcctggctaaagtgggtttcttataaacaccgtgtcactgagtctttcttaaaatacattttgataatttatattggacatttgcatttaatgtgatcatggatatttttggatttacgtgtatgatgttatattttctgtttattaccactcttttttgtttctttttttccccttctctgccttcttttggattacttgaataatttttatattccatttgaatttttctattttttttctcttggtattttttttttagtgattgctctagggattatagtatacctacttacctttttacagtctactgagaattaaatgttttaccacttccagtagaatagagaagctttagcactatgtaggtccttttactctcctccctctatgctgtcttacatattacatgtacacacaatgaaaatgccatcaaaccagtggtgatcatttttgcttttagtcattaaacatattttaaaagaaccgatgcagagacaatagcctactctgtttaatcagatattttctatttctgttgctctttcttcatccttgaagttccacgttcccctcacctatcatttctgtctgaggaacttcctttagcatttcttttagaccagttccaacaagtgattctcttaaattgccattatctgagaatgtcttatattttgtcttcattcctgaaggatgtttttgctggatatagaattctgggttgataatttttgttttgttttgtttgtttgttttttgagacggagtctcgctctgtcacccaggctggagggcagtggcgcgatctcagctcactgcaagctccacctcccaggttcacgccattctcctgcctcagcctcccgagtagctgggactacaggcgcccgccaccacgcctggctaattttttgtatttttagtagagacggggttttactgtgttagccaggatggtctcgatctcctgacctcgtgatccacccgcctcggcctcccaaagtgctgggattacaggcgtgagccactgcgcatggccaatttttttttaaattaaactgctacttcctccggggtttcgtgatttctgatgagaaatcttcaaccattcaaattgtcctcaggctgggtgtgttggctcacatctataatcccagcactttgggaggctgaggcagggggcttgtttgaggctaggagtttgagactaccctgggcaacatcgtgagaccccatcttttacaaaaaattaaaaaactagttgggtgtggtggcatgcacctgtggtcccagctactcaaggggctacggttggaggatcacttgagcccaggaggtcaacactgcagtgtgctatgatcgcaccattgctttccagcctgggtgacagagtgagaccctggctcaaaaaaccccaaaacaaattattattcctctgtacataatgatgtgatttttctcctagctgctttcaagatttttacttggtctttggattttagcggtttgattatgatgtatctgggtgtgaattcttttgagtttattttgtttggggtttgttaagttgcctgaatctgagtttggaaatagaacagaggcacagtgctctactgcatttttggggatcctagtagctgggattacagacgcccaccaccatgcccagctaatttttgtacttttagtagagacagggtttcaccattttggccaggatggtctcgatctcctgaccttgtgatccacccgcctaggcctcccaaagtgctggaattacaggggtgagccaccacgcctggcccggttttgcttctttgacctcatcagcacattgtacagttgttgactcggaaacaccacaaaaatagaagctatgtgagtgatcactgtttagttgggtggtgtgtggctatggatacccatgtacatgagcataaacataaatatgtgtgtctgggagtgtattctagaatgtctcctcccttttacccttgcctctgtatccctgactcttatttcactgtcaatacagaccgtcaacaaagatgtggacgcacaggctgaaggagaagggagccgcccatccatggacttattcagggccatctttgccagttcctcagatgaaaagtcctcatcctccgaggatgagcaaggtgacagtgaagatgatcaggcaggctctggggaggccaacttccaaagctcccaagacactgacttgggggaaacatcatctgtggctcacggtatgtcagtatttcagactcggggatctaaaggagaagacaatgactctaggacagctgcttctctgtttactctataatcttaaacccgaatgattagcaatcaatgatatgtaatcttttatatgtatataatttttttttttttttttttggaaacaggatctggctctgtccccagggtggagtacagtggcgcaatcttcggctcactgcagcttccacctcctgggctcaagcaatcctcccacttcagcctcctgagtagctgggactacaggaatgtgccaccacccctggctaatttttgtatttttagtagagatggggtttcaccatgttggccaggctagtctctaactcctgacctcaggtgatctgcccacctcagcctcccaaagtgctgggattacaggcataatcccagtgcccggctagttttccagacttttaaaatttttatatctcttctatctgaatatatagtaatctgcttaaaaaacaagattattaacgtgaatatgatcatttatcttcaaggttttttctttgataatttattttgagtgaaacttgtctcccgcagttctctgtgatgggacatacatagtcttacattcctgatggtttgtaagattttccttctcagatggccctttcttggggacacatttctacttttcaggtcttaggggcgctaggctacgtgcccacgggtgcacttggcacgctgtacctcagccattgctgcccttggttgcaggtgccctcgtgtgactgacttccagctctggagttcacaagggcagcaccggggtctgcgtgttcactgctgcatccttagcacctggcaggagtgaagtggtgtgggcaagcatatgttatctggtggcaaaagacatgaatgaaagactcagagacattaacatggggcagacgaatgacatgaacaccccgctgtttttcagctcttgtgccagcaccccaggagccgccaccttccttcccgatacaaaagatgcagatagatgaaagagaagagttcggcccgcggctgcctcccgtcttctgccccagtgagtgcagagccctttggttcgcccatttttatcagtgtgtgattgccctgagatggggacagtgtgacttagagccgaccaaacatacgtgcttgcttctggtttatatgttttcagtcatattttaaacccgttgtctccacctagtgcctgaaatgatagttgtttctatacaccttcagagacctccaaactttatttcctttacctgccacatgtttacaggagggtcctaagtatcttaagttttgttatagaaatataagtttcccaacagagcttaaagaaaaagagcctggccgggcacagtggctcatgcctgtaatcccagcactttgggaggccgaggtgggcggatcacgaggtcaagagatcgagaccattctggccaacatagtgaaaccccgtctctactaaaaatacaaaaattacctgggcgtagtgacgcacgcctgtagtcccagctactctggaggctgaggcagaagaatcgcttgaacccgggaggtggaggttgcagtgagccgatattgcaccattgcactccagcccaggtgactgagtgagactctgcctcaaaaaaaaaaaaaaggggctgcagccaggcacaatggctctagctgggctggtggctcacacctgttatcccagcactttgggagggcgaggtgggaggattgcttgaggtcaggagtttgagaccaccctggtgaatttggtgaaagcccatctctactataatttttataaaaattataaaattttataaaaatataaaatacaaaattatatattttatatataaaaattatatatatttttatattttataaattttatatattttacaaatttatatattttatatatttatatattatattttatatattttatatatttatatatttatatatttatattttatatatttatacttatatatatataaaatataaatttaaatatttaaaataaatatattttaacttaatttaaatatatttctaaatatatttaaataaaatatgtaaatatttaaaataaatatatattcatatataaatacatattaaaatatattcatataaatatatatatttagatattttataaattttaatatatttttataattttttatatataacaattatatataaaaattatatataaaattatatattttatacataaaaatgatatataaaattatatataaaattatatatttttatacattaaaattttataaaaatataaaatataaaaattagccaggcatggtggtgtgtgcctgtaatcccagctagtaaggaggctgaggcaccagaatcatttgaacctgagaggcaaaggttgcagtgagccgagatcgagatcgcgccactgcactccagtctgggtgacagagcaagactctgtctcaaaaaaaaaaaaaaaaaaaggtaaaagaggctgggtgcggtggctcatacttgtaatagcagtttgggaggccaaggcagacagatcgcttgagcccagtagtccgagacaagcccagcctgggtgacacagggagacccatctctatttaaaaaaaaagggtgggcacggtggctcacgcctgtcatcccagcgctttgggaggtcgaggtgggcagatcacgagatcaggagatcgagaccatcctggctaacacggtgaaaccccatctgtactaaaaatacaaaaaaattagccggacgtggtggcatgtgcctgtagtcccagctgctggggaggctgaggcagaagaagggcgtgaacctgggaggcggagcttgcagtgagccaagatcgcaccactgcactccagcctgggcgacagagcaagactccgtctcaaaaaataaataaattaattaatttaaaaaaaattaaaaaagaaaaagagaaattaaaaaaatagtatacaaaattggaggggaattgcaagaagagtatttaagactaatatatttttaaaattttatttatttatttatttatttttcagacagggtctcactctgtcacctaggctggagtgtagtggtgctgtcatagctcactgcatgacttctgggctgaagtgatccacccacttcaacctcccacagtgctggaattacaagcgtgaaccactgcacgcagccaagcctcctttttttgtctttttctttttcttttcttttcttttttttttttttttgagatggagttttgctcttgttgcctaggctggagtgcaatggcgcaatctcggctcaccgcaacctccacctcctgggttcaagcgattctcctacctcaccctcccaagtagctgggattacaggcatgtgccaccatggctggctaattttgtatttttagtagagatggggtttctccatattggtcaggctggtctcgaactcctgacctgaggtgatctgcccgcctcagcctcccaatgtgctgggattttaggcgtgagccaccgcacccggccgccaagtctcctttttactttagctaatgtagcaaatacaataaaatggtcctctcagaagtaaatacaatctatcccccattctgttccccaaatatctgtcaacaacttccatttagttgcatcttaaattggcatttcaagttaaaacatttacactggtttatcatctctttgagggctgggtttacaaacatctataacatggcccagatatataactaacataaaaatatcattattcactttatagtttctcatggtgcccatatgtgaatactggtttgattagctaactgctttcaaagacaggattaaaaagcagagaaaaaaagtatgaagttttgacaaattgcagtgaatgtatttcttatttgctatagttgttcagcacttttgttttattttgttttgttttgagacagagtctcactctgtcacccagtctggagtgcagtggcgcgatctcggctcactgcatcctccacctcccaagttcaggtgattctccttcctcagcctctggagtaactgggattacaggtgcctggctaattttttgtatttttagtagagacggggttttaccatgttggtcaggctggtcttgaacttctaacctcaagtgatccacctgcctcagcctcccaaagtgttgggattacggtcgtgagccactgtggcctggttgttcggccctttagtttcttttttttttttttttgagacggagtctcgctctgtcacccaggctggagtgcagtggcgcaatcttggctcactgcaagctgcgcctcccaggttcacgccgttctcctgcctcagcctcccaactagctgggactacaggtgcctgccaccacgcctgcctaatttttttatttttagtagagatggggtttcaccatgttagccaggatggtctcgatctcctgaacttgtgatctgcccgcctcaacctcccaaagtgctgggattacaggcgtgagccaccacgcccggccggctctttagtttcaaactggtatcagcacttgaaagccaagtcttttatgtccctttaccataatgtctttgataccctcgtaatagtgacttaatttggtctatgggttatttagggaaatgatttttgaaaaaaactagtgttaaaaaaaagttttgggctgagtgcggtggctcacgcctataatcttagcactttggaaagctgaggtgggaaaattacttgagtctaggagtttgaggccagcctgggcaacatagagagattgtatctcttaaaaaaataaaaaagaaaaaaattagcctggtgtggtggtacatgcctgtggtcccagctactcaggaggctgaagtgggaggattgcttgagctcaggaggtggaggctacagtgagctatgatcccactgctgcactccagcctgggtgacaaagcgagatgctgtctcaaaaataaataaataaataaataaataaataaataaataaataaatagctgggcacggtggctcacgcctgtaatcccagcactttgtgggggccaaggtgggcggatcacctgaggttgggagtttgggaccagcctgaccaacatggaaaaaccctatctctactaaaaatacaaaattagccaggcatggtggcacatggctgtaatcccagctacttgggaggctgaggcaggagaatcgcttgaacctgagaggcagaggttggggtgagctgagatcgcaccattgcactccagcctgggcaacaagagtgaaactctgtctcaaaaaaaaaaaattaaaagaattttggaaaaaaaaaaagttttgggaggttgaattttgaaaaatctggttgggcatggtagctcacacatgtaatcccagcactttgggaggctaaggtcagaggatcccttgagtccaaaagttcgataacagccttggcaacatagggagactctcacttccacaaaaaaattaaaaaattagccgggtatggtggtacatgcctgtagtcccagctactcgggaagccgaggtaggaggatatgtgaaccgaggtcaaggctgtaatgagctgtgattgcaccattgcccaccagtctgggagacagagcgagaacctaaaaaaaaaaataaataaagaaataggactacaaaattgcaggcatctgttaactgagttgagaaaatattcacccttacaaaacatcttgaaactttccttttttttttctttttttcttttttttcttttgagaaggattcttgctctgtcacccaggctggagtgtagcacgatctcggctcactgcagcctctgcctcctgggttcaagtgattctcctgcctcagcctcctgagtagtggggattacagatgcatgccaccacgcccatctaatttttgcatttttaatagagacagggtttcaccgtgttggccaagctgattttgaactcctgacctcaagtgatccgcccacctcagcctcccaaagtgctgggattacaggcatgagccaccgttcctggccgaaacttttctttaggtgaaaaaaattgatttaatgcctttcactgcttctactattgtgaaattttgttgatttagttacccagaaattaatgacctatgaaaacattttggtctgaatttggagatggagaattgaggcacatgcaaattctttaatgatttttaatgattatatacattattattattttttaaagttaggtagagatagggtctcactatgttgcccaggctggccttgaactcctgaggtcaaggatcctcctgcctgggcctcccaaagtgttgggattacaggcatgagccaccgctcccagcccattatgttgttttgatggtagttttttcagtgtttccacttgtaagacaaattcttataaaatacgtttttgtagagagaggaggatataagaagagctaacatttaggtgccagattctgagcttcgagaatcatggacatggccctgtctagtctagtctgtgtccctaaaaggattgggattcttattgtccccattttatagttggggaaactgggcgtgggagaggttaggcgacgtgtcgaagatcacagtgctggcagcagagctgagttccaattttggtctgtttctgagcttatctgatgatgttggattacaaaaggctttgtgggctttctggtccgactttatctgcatctggcagctggggtcacggcaggatactgattggatcacacaggtctttgttgaggtctctgacagctttctaagtacaactctgcaaggtggtgtgctaatctgtttctcagtgaggcagaagctaatccaagggcaggagttcttcctcagtgttaaacattccatctacactagatgcctgattcagcagtttaggagcttagttttggatagtctttgttttcgtgctatataggtcctgtgtttattacctttgtgtttcagatgctcgtcagacacttgaggttcctcaaaaagagaaacataaaaagaacaaagacaagcacaaggccaagaaagagcacaggcggaagaaagagaaggtgagagacttgtgtgtaccccaggatcagtgtggggtgggacccgctggtcagcccccaggagtgtcatatactgcagctgaagagcggatctggtggccaagtcacagttctctctgagacttaacagaaatgttgacattcaattcaaatgcttgatttttcagaaacattttcttttgcacttaaacgcccccccgctttttttttttttgagatggagtctcactctgttgcctagggtggatggagttcagctgcaacctctacctcctgggttcaagcaattctcctgcttcagcctcttgagtagctgggaccacaggtgtgcaccaccacacccggctaattttttgtatttttagtagagatggggtttcaccatgttggccaagctggttttgacctcctgacctccggtgatctacctcccaaagtgccgcgattacaggcatgaggcaccatgcccagcccttaaaaaaactttttttgtgaacattaaaaagcagaaaaaagggcatttagggatcttagagcaatgggtgaatattaaataataaaacaatttatttcttatttattcaatgttaagtgaaggtattattttcagcatttctcagctactttgtctttattagtttgagattttagtccgtcacttgccgtttgaagtaaaagaattcgaatggaaggcaggcatgtgctcccactgttgacgtctcttatttcatcaaccatgtcttcttttgggtttcagcacaggcttttaattaggttaatgttcttgttgggtacccaaagtagtctgggctaggtgctgaagaaattagaaacagtttccttactggccaccagagggaagcactcccacgtatggcggatgacgggcgttccctcctagtgaaaggaagaaaatgtgtgccgaccaaatctgtgtgtccttaccagtgtatctgctgttcggtaaccttctgccagtttcttccttgtggttttcctgggtgcccgtcatcctgacatgaagtttcccaggggtctgacaaaataaacaagtcaggttcaccggaggtggcacaggtcaccatgcataagatgtgtggtgtcacgtcttatgacaccaagtgttacgataggtcctgtctgcgccttcttggttctgctgtgtctgttgctggaggcgcagctgggtcagggtgcgcagttgagagtggcacagccgtctgccctgtgctgtcttgttaggctctcactctcactcactctaaatgaggtttaaacatttttttgaatgactccatcactgcagccttgttaacctttcattgtattgaattaaggaggaaaaaatacatttgttttcccccaccactatttgttttttacagaaaaagaaacacaggaagcacaaacacaaaggcaagcaaaagaataaaaaaccagagaaaagtagtagctccgagagttccgacagcagcgacagccagagtgacgaggaaaccgcagacgtgtcgccccaggagctgctgagacggtgggtagtgggagatggagggtttttcagaaacctttagaggcttattgagtgcttgatgtgtttgcttagaggcaaatatcagaaatgaaaaactggtaggccgggtgcagtggctcacgcctataatcccagcactttgggaggctgaggcaggaggatcgcttgagcccaggagtttgagaccagcctgggcaacatagtgagaccccagctctacaaaaacaaacaaacaaacaaacaaaaaacaaattagctgggcgtggtggtgcacacctgtgcctccagctatttgggaagctgaggtgggaggatctgttgagcccgggagttggaggttgcagtgagccactatcgtaccactacactccagcctgggtgatagagcaagaccctctccctaaaagaaaaaaaaaaatgtgtgtattaactaggctttttaaaaagtttgaatatctaattatgtaagtgatatgtgaatatattatcattatgaaaattcaggccaggcgcggtggctcatgcctgtaatcccagcactttgggaggccgaggcgggtggatcacaaggtcaggagctcgagaccatcctggctaacacagagaaaccccgtctctactaaaaatacaaaaattagctgggcgtggagcgtgtgcctgtagttccagctgctggggaggctgaggcaggagaatggcgtcaacctgggaggcggagcttgcagtgagccgagattgtgccactgccctccagcctgggcgacagagcgagactcttgtctcaataaaaaaaaaaaaaaaaagaaaagaaaattcagaccttacagccaatgcttaaaggagccctgactagttctccaaacctctactttctccacagtaacttctgccatcagtttcatatgtaacctttaagaccttttttgtgcaaccacacacacacacatacacactcacgtacatggatgcacatacacattgtttgtttcttttttagacgagtctcgttctgtcacccaggctggagtgcagtggtgcgatcttggctcagtgcaacctctgcctcccgggttcaagcagttctcctacctcagcctcccaagcaactgggattacaggcacccgcccccacacccagctaatttttgtattttgtatttttttagtagagacagtgtttcgtcatgttggccaggctggtctcaaactcctgacctcaggtgatacacccaccttggcctctgagtgccaggattacaggtgtgaaccaccatgcctggcctatatacagatttttgtgcacattttaaatataagtaatataattttatatagcatatatttatagggtatgaattttattttattttttgagacagagtctcgctctgtgacccaggctggagtgcagtggcctgatcacagctcactgtaaactctgcctctccggctcaagggatcctcccacctcagccttcagagtagctgggactgtaagtgtgcaccaccacacccagctaatttttttaaaaaatcattttttttgagacagagtcttgctctgtcacccaagctggagtgcagtggcgcgatcttggctcactgcaagctccacctcctgggttcacgccattctcctgcctcagcctcctgagtagctgggactacaggtacccgccaccacgtccagctaattttttgtatatttagtagagacggggtttcaccgtgttagccaggatggtctcaatctcctgacctggtgatccgcctgccttggcctcccaaagtgccgggattacaggcgtgagccaccacacccggcctaaaaaaatcttttttgtagagatgggatctcctatgttgcccaaactggtctcgaactcctggcctcaagtgatcctcctgcctcagcctcaggcgtgagccgctgcgcaggcctgctcttgccagttttatctttattgggaagaagggtgttgtgtgaattctttgagtgtctggcttctgagattccttcagatgatggtaggcagcagtgaggggcttgtagtcattgctgtggaagattccttcttgtgagcacaccacggtatgtttatctcttctgttgtgtggatactgggttttttactttgagtctgtggagcagggattttcagccagtgtgacccagctctgtttcaaatagaactgccacgaacattcctatatgtatgaaattcagatttaggccaggtgcggtatctcacgtctgtaatcccagcactctgggaggccgaggcaggcggatcatgaggtcaggaaatcgagactatcctggttaacacaatgaaaccccaaaccccatctctactaaaaaaactagccaggcgtggtggcacgtgcctgtagtcccagctactcaggaggtggaggcaggagaatcgcttgaacctgggaggtggaggttgcagtgaaccgagatcgcgccactgtactccagcctgggtgacagagactctgtctcaaaaaaaaaaaaagaaaagaaattcagatttaagactgacaacttgggggctgggcatggtggctcatgcctgtaatcccaataccttgggaggtcaagatgggaggatcgcttgagcccaggagttcaagaccagctcgggtaatatagggagaccctgtctctataaaaaaattaaaaaaaaaaaaaagacaacttggatgctttgggccctggagtgaatgtattttagttccttcccaagggtcatgcaacggatgcggtaggtgagtgaaactgagattaaaaattgcttgtattctcaaggctaaataagactagggaaaaaagttgcttttataagtggtcttaatacgaggtgtgggtgagtgagtctctgtgtgttttcagggtaatagaagaagcattttaagaacacagattggccgggtacggtggctcatgcctgtaatcccagcactttgggaggccgaggcgggcagatcacagtcaggagttcgaaacaagcctggccaacatggtgaaaccccatctgtactaaaaatacaaaaattagctgggtatggtggcatgtgcctgtaatcccagctactctggaggctgaggcaggagacttgcttaaacctgggaggcggaggttgcagtgagctgagatcgcaccactgcgctccagcctgggcgacaaaagtgagactccatctcgggggaaaaaaaaaaaaaagcacagattaggcagtacttcattgtgggttattgtgagtgcattttgtaggtgcagacatgctgctgtgatatggggaggcctggcattctcagcctccacggagctgtttggtttttcactttagctaactttccatttctctcttttctgttttcttttccaggctgaaaagtcttccactaagaaggcagtaattgaatgctgccctggctcgtcctagaatcatttctcctccatgatggaagcccagtgattgttcagttaacgcattgtacagagtgtatttatatgtaaattcctgctgtaaaataatttttaaaaccttgacatttcaaagactgccttgaaaggtcgcagaaattgatttctatttttaatttcagttagtatcgggggaaaaaaatccagactgaacagtttaattaaagtggaatttttctattttcttcttgatttttaaaaaatttcctgggacgttaaaaaagaagttaaaagtgaaggcttctctctggttttgtgatgaagacagcctggactcactgaaggacaagcgtgtgagaaggggcggttgcggcccctcctgccgttttttgggagtgaagctcttccctctctgggtggctgggttactgttggtgcccaggaagccccatgggagggcagagccagggcctggcagggggcctcagcctctcagggtagatgtcactaaagtgtctgagacaggcagggaaaccaggcaggagaatgtgcacccacagcctgggttacacggctgcagctccctgctctgaggccacctcatgtgtaccaaggagacctttttgaaaaataaagtgcagaccaggtgtgatggctaatgcctgtaatcccagagctttgggaggccgaggcgggaggattgcttgagcccaggaattccagaccagcctgggccacatagagacccctgtctccacaaaaaataaagtattgagcatttgtattttacattatgaaagtagcatcatagatcacaacaattttaaaagcagaaagaaggaagaggccgggtgcggtggcccatgcttgtaatcccagcactttgggaggccgaggccagcggatcacttgaggccaggagttcaaaaacagcctggccaacatggcgaaaccttgtctctactaaaaatacaaaaaaattagccaggtctggtgagcatacacctgtaatcccagctgtgtgggaggctgaggcacgagaatcctttgaaccctggaggtggaggttgcagtgagccgaaattgcgctactgcaatccagcctgggtgacagactcttgtctccaccaaaaaaaaaaaaaaaaaaaaagaaggaagaaaatcacttttagttttatcatccaaagatgacacccttcttcaatattttgaataattccaccctgtccttttctagctatggggctgttatctgactggtggtagcattttattccctgtcactgttgttggggttgtgacagatatttccctcatctattataaatgttgtaaacccacccctaataactgcatcttatttcatgcaggggctaccccataacttactgaccttttctgttttgtcatgaagtgggttggccaggagctgtacccaggcagaggacatgaagaaattgccctgtgacaggagccagggaaaccacagcggagggctggaggctggggtgctggttttgctggctcggcctggttcccagaatgcaaagcccatttttcttttttttgcaacctccacctcctgggttcaagccattcccctgcctcagcctcccatgtagctggaactacaggcgcacgcccccatgcctggctaatttttgttattattttttttaagtaaagatggggtttcactaaacctgttggccaggctggtctccaactcctgacctcaggtaatccgcccgcctcggcctcccaaagtgccgggattacaggcgtgagccaccgcgcccggctgcaaagcccatttttctataggtaacctgtgctgcgcggggtggcactagttttcacccagcgggcgaggaggcagcgaagtcgcgggcccagcgtagcgcgcgcctccgaagggcttggtgcgggcgcgggcgcgggcgcgcggcgccaccgttcccatccaggcttgtcggcggccaccggcggaccgggcttcgagatggcctccccgccgcggtgctccccgacagcccatgacagggaatgcaagttgccgccaccctccgcccccgccagcgagtattgtcccggcaagctgtcctgggggaccatggcgagggccttaggccgcttcaagctgtcgatcccgcacacgcacctgctggccaccctcgaccccctggccttggacagggaaccaccaccgcatctgttgcctgagaagcaccaggtgccggagaaattgatctggggcgaccaggaccctctctccaaggtcagaaccgccgctggggtgagggggcactggcctgttccccacacgggaggaaggcgctcgagctgtcgggggacccatggaaaacccacctggcttcaccaggacccccagcgaggccctaggcccatttccccatctgtggtacatctgtgggcaaaggtcagacccacctgagcagggcgtgctggggatgccggcgggggctccccgcactgccacctgctggggaaccaggactcttcgctgggaggaggctctgccccaccatgtgaccccatctagaccttggagtctccgtaggtaggcccacccacagtgatgctcctaattgcagcccaagggtcggtggctcagctctccccgtccaggagatacagttagcgtcagaagaaacgggaaactcagaataataataacaacaatgaattgggccaggcaaggtggctcacacctgtaatcccagccctttgggaggcccaggtgggaggatcacttgagcccaggagtttgagaccagcctgggcaacatagtgagaggtcgtctctacaagaaataaacttagcccagtgtgatggggcgcacctgtggtcccagccacttgaaaggctgaggcaagaggatcccttgaacccaggagtttaaggctgcagtgagctatgattgtgccactgcactccagcctgggcaacagagcgagactgtctccagaataaataaataaataaataaataaataaataaataaatatagagagagagagagaaagaaagaaagaaaaagaaaaagaaagaaagaaggagaaagaaagaaaaactggctgggtgcagtggctcatgtctgtaatcccagcactttgggaagccgagatgagcagatcacttgaggtcaagggttcgagaccagcctggctaacatggtgaaaccctttctctactaaaaatgcaaaaattagccaggcatggtggtgcgtgcctgtaatcccagctactcaggaggctgaggcagcaagatcatttgaacccgggaggcagaggttgcagtgagctgagatcatctcactccatctcaaaaacaaaacaaaacaaaaacccaataaagaacattctcaataagtagcgtttcatgcttggccttgatttattgcactcacatgcagatgtcagagtgtgtttttaataatttcctcgaaacctctgcctggcttcccagcatgtttaagatgaagtctggcgatctgcctgtggccttccaggccatttcaaatctggcacctctccatgttctcctcccccatccccctgtcttgctgacctacaagcaggtctggcctcagggatcttggcggttccctgcccccacggtattgcgctcttggggaggccctccctgaccgcccgtctaaagtagccagggccactgtctcctccgtgcctcatgccatggtctgacatccccgttccgtcctcaaggtgtcctctggctgccagcaactggcccctcgaggttagggactttgctcctaggtggctgctgagctgcagcatcaggtccaggccccatgggggaggaggctcttgaggtttatttgtggaatatgtgaatgaacgctacgcatagaagaaccgttttgtttttgctctgtcctctgcatgagctttgtcagcacctctgaaatgtactcatgtgttggggacttctctctgcagcccctgggacccctttacctagtggatcccaagggactgtgtgcagaaaaaaacctgaaacgagagccccagaaaagcctgtggtgggggtagcggaatggttcccccctcttgctaatgtttttccatgatggagttctaggttttttgttttcctattttttaaattaaattatatattttttaaattattaattttaattttgattttttttgtagagagggggagtctcgccatgttgcccaggctggtcttaaactcctggcctcaagcaatcctcactcctgggcctcccaaagcactggaattgcatgcgtgagccactgcacccagccaatttaatttcaatttttaatgatagttgggttttcctaatgagagagataacccaaaccctgcaggggcggcaggggctggggtcgccagaggcgggggcggtgcgggagggccgcgcaggtcatgtcccggggactggggccgctcctggggtagggagccaaccctgcacgcgcggccccggcctggcccgacggggttagcgaactcccccggagaaaagcccggtcccagctctccacgctccctggcaacggagcccgcgttccagtgtcctcgtgtccccgagccccctagaggcggggtatcatctcatcccctgcatctccacctgcacgtccccgacacccccccccccgccccgcatcacctgcaaccggaaggccaccgccgccctgaaccgtcgcatcccctcacccctgtcctcctgccaactcagcccagcaccctgacactgccttccaggccacacccctggtcttgcctccaacatttcccccacccccacacttccgcagctcaacctgggacgtgtcgccatgcgcgagctggggtgggtgggtggggggggtgacatcttcaggcttccctgctctgtcctctttttttccccccagttttactgagatataattcacgtaccatataatttaaccatagaagctgtagtggtttctagggtattcagagtactgtactccccagttccccaatacccatcctgccgacaccaggcaattctgctttctgtccatagatttgtctattctagaccttttatagcgatagaatcaagccatacgtggtctcttgtgactggcttcatttccttagctaacgtcctcaaggttcatccatgttgtagcctgtagcagtgctcccttcccttttcattaccaagtaatattctgttgcatggccatgacacattttctctttctttgagatggagtctcgctctgttgcccaggctggagtgcagtggcgtgatcttggctcactgcagcctctgcctcccaggttcaagcgattctccagtctcagtctcccagtagctgggcttacaggcatgtgccaccatgcccggctaatttttgtacttttagtagagacggggtttcaccatgttggccaggctggtcttgaactcctggcctcaggtgatccacccaccttggcctcccaaagtgctgggattacaggcgtgagccactgcgcctggccgaaccgcccgtttttcaaagtggctgcactactttacgttcctaccagcaatgtaggaggtttccaactattggcatccttgccaacacttgttatgggactttgatgatagccatcctaacaaatatgacacagtatcacactttggttttcttttctttctttctttctttcttttcttttattttttaagacgaagtcttgctctgtcacccaggctggagtgcagtggcatgatctcagctcactgcagcctctacctcccaggttcaagcgattctcctgccttagcctcccaagtagctgggattagaggtgcccaacaccacactcggctaattttttttttttttttgagatggagttttgctcttgttgcccaggctggagtgcaatggcacgacctcggctcactgcaacctccgcctcccgggttcaagcgattctcctgcctcagcctcatgagtagctgggattacaggcatgcgccaccatgcctggctaattttgtatttttagtagagacggggtttctccatgttggtcaggctggtctcaaactcccaacctcaggtgatccacctacctcagcctcccaaagtgctgggattataggcatgagccaccgtgcctggcctaatttttgtatttttagtagagatggggttttgccatgttggccaggctggtcttgaattcctgacctcaggtgatccgcctgcctcggtctcccaaagtgctgggattacaggcatgagccaccgcgcccggccacactatggttttcatttgcactttcctgatgtggtgagtcatgctgagaatcttttcatgtgctatcaactatttttattttttctttttgagacagttctcactctgtcacccaggctggagtgcagtgacatgatcatagctcattgtaacctccgcctcctgggttcaagcaattctcatgactcagcctcctgagtagttgggattacaggagcacaccacgatggctggctaatttatttatttttattttttattttttagtagagatggggttttgccatgttggccaggctggtcttaatctcctggcctcaagtgatccgcctgcttcagcctcccaaagtgctgagattataattgtgagccaccacatcccgcccttgcatatcttctttggagatatatctattcaaatcctttgcccatttaaaattttaatttttattatttaaaggcagggtcttgctctgtcacccaggctggagtgcagtgctgcaatcatagctcactgtaacgttaaccttctgggctcaagtagtcctcccgcctcagcctcctgagtggctgggactacaagtgtgagccaccatgcctggctcattttctttcttcttcttttttttttttttccaattttgtacagacagtctcactatgttgcccagactggtcttgaactcctaggctcaagcagtcctcctgccccagcctcccagaatgctgggattacagggatgagccaccgtgcccagccagaattttttttttttttttcagatggaatctcactctgtcacccaggctggagtgcagtggtgcaatcttggctcactgcaacctccgcctcctgtattcaagtgattctcctgcctcagcctccgagtagctgggattataggcatgcgccaccatgcccagccaagttttgtatttttagtagagatggagttttgccatgttggccaggctggtcttgaactcctgacctcaggtgatctgcctgcctcggcctcccaaagtgctgggattacagacgtgaaccacccccctggccagaattttttaaattcatttttttccgggtggtttattgcaagtgtttagaaatataattaactgttgtacattgattttgtgtcctgcaacatgtttagctcatctggtctctccttttttcagatcccatttaaaattctgagtgggcacgagcacgctgtgagcacctgccacttctgtgtggatgacacaaagctcctcagtggctcctatgactgcactgtgaagctgtgggtaggtggccggctgttaggtactcctggagcgaaaacctttcctaagcttaggcacctcctgtgtcgagttccccagcactgaactcacaggcacttgtgggtcctggtttgcaggtcttctgagcaaagtgccagaaggaggagagggtgagagcccagcctagacgaagttagggtggctgctgccagcttgcaggcctggaaacagtgggaatgggatggagacctctggactgagagtgccacacatttttttttttttttgagacggagtttcgctcttgttacccaggctggagtgcaatggcgtgatctcggctcactgcaacctccgcctcctgagttcaagccattctgctgcctcagcctcccaagtagctgggatttcaggcatgtgccaccacacccagctaattttgttttttgtttttttgtgttttttagtagagatggggtttcaccatgttggtcaggctggtcttgaactcctgacctcaggtgatccacccacctcggcctcccgaagtgctgggaatataggcatgagccacagcgactggcccttttgtttgtttgtttgtttttgagaacaagtgttgcccagatggagtgcaatggcgtgatctcagttcactgcaacctctgcctcccgggttcaagtgattgtcctgcctcagcctcctgagtagctaggactacaggtgtgtgccactactcctggctaattttatttttttagtagagacagagtttcaccacgttagccaggctggtctcgaactcctgacttcagatgatccacctgcctcagcctaccaaagtgcagggatgataggtgtgagccaccgtgcctggcccccacaccttttttttttttcctttcttttcttttcttttcttttttttttttttgagacagagtcttgctctgtcgcccaggctggagtatagtgccacgatctcggctcactacaacttccgcctctgggttcaagtgattctcctgcctcagcctccctagtagctgggactacagaggcacgccaccatgcccagctaattttttatttttagtagagacagggtttcactgtgttggccaggatggtatcaaactcctggcctcaagtgatctacctgcttcggcctcccaaattgttgggattataggtgtgagccactgtgcccggccaccccacacacctgtcagagaacggaagtcctggctgtgtttggggcctaggatgtcatctctctgggtctccttctcatctggaaaactgagctccatccacagagactggatggccaggtctgtgtggtcacagaggacagaaaggtgtccaggcctgggacctgttcatgaggggtggttggaagaggcaggcctgggtgcagatcagcaccccaaggtgcagcaggcaggggcaccggggatggggctgtgaggttcacatgaggttgcagaggtggctcctggagcccttctggggactgcagggcatggccagcaggcccaggcagtgcagatcactcaggagggctggggaggagcagggctgggggaaggcagtggccatgaggccaggctgcagaaggctgtgtggctggggctgggactcatgggagaggacggtcagttgtgagttttgcagcatctggcttcagggacaggagtggagggagttgaggctggttcctgggttctggtttgggtaacggggaagaggatagcccctcaccctacagacgacctcaagggaatgttttctctggtatttcctgctagggggacagatactcgcatgaagatcggaaataaagacatcagttgagtggttcttaggatggtacaggcaaaaggatttaagggtttggaacagaggatttttttgagacattatcagtcaatccccactattgtctgtttttgtttgtttgtttgtttttaatgaatttaagaccattggcctataacttcatacttgctcttttgtgaaatggaaatgggagaaaatatgcatacacacacacacacacacagccacaagatataatctgtgccaagggcatgacaactgggcaggagggtttgtggtggaccccacgtttaggacttaccagctgtgtgaccctggggggttgcatgacctcctgggcctccctgggtctgcccatgctgcacaggaccagttgtgtgaaggggctgccccggggctcaactcacctccactcccgccctccgtagctgtccttatggacacctggcccacagagcccagagcctcaagatcttgttagaaaaactgctggtttctctgggagcctcacccccacagcccacaggataacactagaggaattttttctttgttttgttttagagacagagtctttctctgtcacccaggctggagtgcagtggtgcaattacggctcactgcagcctcaacctcctggactcaagcaatccccccatctcaacaccccgagtagctgggactgcaggagtgcaccaccacacctagctaattttttatattttatattgtagagatgagggtcttgctacattgcccaggctagtctcaaactcttggcctcaagcaatcctcccgcctcagcttcccaaagtgctggaacttcaggcatgggccaccaaagtcccagtttcatagatgtatgcggacatgtgtggacaagaaaaaaagacacgtcggctgggcgcagtggctcatgcctgtaatcccagcactttgggaggccgaggcgagcaaatcacctgagatcaggagttcaagaccagcctgaccaatgtggtgaaaccccgtctctactaaaaatacaaaaattagctgggtgtggtggcaggtgcctgtagtcccagctactcaggaggctgagacaggagaattgcttgaacctgggaggcggaggttgcagtgagccgagatcgcaccactgcactccagcctgggcgacggtgggagactccgtctcaaaaaaaaaaagaaaagacatatgccaacatattcacagctgttaactctggggtcatggaaggatgaatgtttttctttcttgtgttttctgtaataaaatcatattacctttgtaataatatgagaaaaactaccaaacttacatttttttttttttttttttgagacagggtcttgctctatcacccaggctggagtgcagtggcaagaacacagctcactgcaccttttacctcctgggctaaaggcatcctcccatctcagcctcccaagtcgctgggaccacaggcacacaccaccatgcctggctaatttttttgtttttcgtagagacagggtctcactacattgcccaggctggtctcaaactccttggctcaagcgactctcctgcctcagcctccaaaagtgctgggattacaggtgtgggagcatgtttttttttttttcttttttgacacaggatctcactctgttgcccaggctgaagtgcagtggtgcagttatggctcactgcagcctcaacctcctgggctcaagtgatcctcccacctcagcctcctgagtatctgggactgcaggaacaggctgccatgcccagctaatattatcattttttgtagagatgggatctccctgtgttgcccgggctggtcttgagctcctggcctcaagccgtccttcctccttggcctcccaaaacactgggatacagcatgagccaccaaaacccagccccaaacttatttttaaatgaccagaaaaaaggtggcaatatattagagggagattgggcataggatgaagaatatttttcccagcttctctgtacatttatggactttccaagttattcacaataatctccaatgaggggaaaagggttttttgtttgtttgtttttttgagatggcgttttgctcttgttgctcaggctggagtgcagtggcgtggtctcggctcactgcaacctctgcctcctgagttcaagcgattctcctgcctcagcctcccaagtagctgggattacaggcacctgccaccacgcccggctaatttttgtatttttagtagagatggggtttcatcatgttggccaggctggtctcaaactcctgacctcaggtgatctgtccgccttggcctcccaaagtgctgggattacaggcatgagccactgcacctagaggaaaaggggcttttaaaagatttaaaaggtatttggatttgaggtgttgctgggggcagggactggaaacggggtcagtgggtgaggcagagaggggaggccaggggagattttggccaagatactgtgacaagaggagatgactgtgtagggttatgggttcaccctctacggagggacatggagcgcatggtgggagccacagctgagggtctcaaggagccagcagggggggacgaagatggaagaagagagccaggggaggagacaggtctctggagtggcagccaatgggaccagctaaggcaggggctcagaggagaggtggcgatttatgggacaaggggcgaaggcactaggagggcagagggagggagcacagggatgaggggctgcctggagaaagtggtggagggaggagggctggaagcagtctgtggtgcgggtggggaacacttggatgcacttcctgggacatggagaaggacggctcatgggaaggagggcatatgaggtggcagaggtgacagtgcctgcattgtggatggggcatggaacaggcagggaatgagagcaagaaggctgttgtggggaccgagggcctctccaagattagggtctctaatcttgggacaacaaccaaggtgaaaacaggcatctttcccttcatggagacaagagccctttggccaacacagacagcagtcccggggggcccttctgccgactcaaaaggggaaagaagggccgggcgtagtggctcacacctgtaatcccagcaatttgggaggcccaggtgggtggatcacgaggtcagtagttcgagaccaggctggccaatatggtgaaaccctgtctctactaaaaatacaaaaaaaaaaaaaaaaaaaaaaaaaaaaaggccggggggcgggaataacgtgggagaattggaagatgcaaggtggactgcacaggtggcaagttaccatcccatcccctgggcaatgacaaggggagaggctcccttgcccctggggtctctcagtcaccccagaggattaagaaagggtttaagtctccctgaaagctgagtgcaatggcccacgtctgtaatcccagtgctttgggaggccgaggtgagagggttgcttgaggccaagagtttgagaccagcctgggcaatgtagcaagaccctcatctctataaaataaaaaataaaaaattagccaggcatggttgtgcacttctgtagtcccagctactcgggaagttgagatgggaggattgctggagcccaggaggtggtgcctgcagtgagccataattgcaccactgcactcaagcctgggtaacaacagagtgagatccagtgtcaaaaaaaaaaaaaaaaaaaaaaaaggctggtcacagtgagtcacgcctgtaatcccagcacttttggaggttgaggcaggaggatcgcttgagccaaggagtttgagaccagcctgggtaatatagtgagaccttgtttctaccaaaaacaaaaaaattagccaggcgtggtggcgtgtgcctatggtcccagcgacttgggaggctgagatgggaggatggctttggcccaggaggccaaggggtgcagtgagccgtgttcttgccactgcactccagcctgggtgatagagcaagaccctctctcaaaaaaaaaaaaaaaaagtttggtagtttttctcatattattacaaaggtaatatgattttattacaggaaacacatgaaaacacaagaaagaaaaaaactcatctttccatgaccccaaagttaacggctgtgaaaatgttgtcataggtatttttttcttctccacgaacatccacatacatttatgaaactgggactgtaccaaaatactgatatgtactcaccataaacgtagacgccaaatattgtcacatctcctttattttccaactgtttattagaccccctttccctcgttcatttgaagtctaaccagtatttcccctttaaattgtctgggtccacagggatggggtcgtgcttctaaatgcccagtgtggagggagtgggccgatctctgcacagccgctgttcctgctcttggccacttggtgtcactgtcgagtctaaaactgcgcagccccacggacactgatcattctggcgctgccctcagttggccccggcccgcccagagtgcgtgcaggggcctggatcccacaacccaagacgatcattttcttttctttttgagacggtgtctcgctctgtcgcccaggctggaatgaagtggcgcaatcttagctcactgaaacctccgacttccgggttcaagcgattctcctgcctcagcctcatgaatagctgggactacaggcgcgcgccaccacacccagctaattttcatatttttagtagagacgaggtttcaccatgttggccaggctggtcttgaactcctgacctcaggtgatccacccacctcggcctcccaaagtgctgggattacagtcgtgagccaccgcgcccggcctggaagatattgctagattctgcaaagactttttggccagtaggaaaggaaaacacaatctgtttgcagctctgcccccagcatggccagtttccacctggtgtctggaattgcggggtaatttcccatggatgccaggaatggcaagggtgtccttcccgctcaggggacggacatgttgcaaagtcctttcctctttcggagctgagtgagagtcccaggaccttggagttctcagattttgctaccagagataagctaagggctaatgttgacctcgatttacgacttcagcaaacacggcagtgaccactctcttctcctctctctcccgttgatttgaggatccggtggacggttctgtggttcgcgattttgagcacaggcccaaagctcctgttgtagagtgcagcatcaccggcgacagcagcaggtgacctttccctcgtcttacactgggaagagggagggtgagcaggcatgccataaataggtatgcctgtgacatttttgtttttgttttaagtaatagatatggggtctcaccatgtggcctaagctggtctcgaacctgtggtctcaagcgattctcctcctgcattggcctcccaaagtgttgacattacaggcatgagccaccacacctgggctttgtgaatttttattttttatttagacaggattctgctctgttgcccaggctggagtgcagtggtgcaaacatggctcactgaagccatggactcctgggctcagtgatcctcttgcctcagcctcctgagtagctgggattacaagtgtgcaccaccacacctggctaatttttgtatttttgtacagatggggttttgccatgttgcccaggctggtctcaaactcctaggctcaaacaatcctgccttggcatcccaaagtgctggaattacaggcatgagccactgtacctggcctgttttgtttttgagatagggtcttgctttgtcacccacgctgtagtgtactggtatgaaaatgtaagtttcatgggaatttatctttttttttttcttttttgagacagagtcctgctctgttgcccaggctggagtatagtggtgcgatctcggctcattgcaacctccacctcctgggttcgagtgattctcctgcctcagcctcctgagtacctgggactacaggtgcacaccaccacagctggctaatttttttatttttagtagagaggggtttcaccatgttggccaggctgttctcgaactcttgacctcaggtgatccacccacctcggcctcccaaagtgctgggattacaggtgtgagccaccatgcccacatgggaatttatcttatatagaggacaaactttgccacagaaacgtgccatgtaagaagacaaggatacatttatgtttttttgtacaagaaaacatttcagaacaaaataagtagtctcttaaactatatccctgtgaaaagacagacatgggagcagagaggaaaacgattgatccttgcgggtgtagagatccctttaggagaggaaaacagctgggaggctgaggcgggcggatcacctgaggtcgggtagccttgaacaaggctagcctgaccaacatggagaaaccccggtctctactaaaaatacaaaattagtcgggcgtagtggcacatgcctgtaatcccagctactcggaggcttaggcaggagaattgcttgaactcgggaggtggaggttgtggtgagctgaggtcacgccattgcactccagcctgggcgacgagtgaaactccgtcttaaaagaaaaaataaaaaagaagaagaggaaaacagaagaaatgctactttgaaagcccttgatataaaggagcatgtgtgggtggctgaagagtactggggatgattgtgctgtggttccttgtgtgttaggtcctatttccttccttccttccttccttccttccttctttccttccttccttccttccttccttccttccccttccttcctcccttcctcccttccttccttctttccttttttttgatggagcctctcctgcccacgctggagcgcagtggcgcaatcttggctcactgtaacctccgcctcctggttcaagagattttcatgcctcagcctcctgagtagctgggattgcaggtgtgcaccaccatgcctggctaatttttgtatttttagtagagatgaggtttcaccatgttggccaggctggtcttgaactcctgacctcaggtgttctgcccgcctcagcctcccaaagtgttgggattacaggcatgagccaccgtgcttggctggttctctctagtttcagtgagaaccgaatggtccctagggtgggtgatggagcagtcttttaaagatgattgtgttaattataatcttggtcctaaattagaaaaatgaaaaaaagtcttcatagaagtcataggcaggccaggcgtggtggcttattcttgtaattccagtactctgggaggctgaggtgggaggatcgcttgaggccaggagagaccagcctgggctctgtctctaaggaaaaaaaaaaaaagagagagagaaaaaaatagccaggcatgatgatgagtgcccatagtcccagctactcaggaggctgaggtaggaggatcacttgagcccagaagctcaaggtggcagtgagctaggattgcaccactggactgcagcgtggatgacagagtgacatcctgtctcaaaaaagaaaaggaaaggcggggggcgggggaggatggaaaggaccacagacctaactgtctctgttgttaagaatcaatgtttggccaggcgcggtggttcacgcctataatactagcactttgggaggccgaggcaggtggatcacttgaggtcaggagtttgagaccagcctggccaacatggcaaaaccccgtttctactaaaaatacaaaaattagctgggcgtggtggcgggcgcctgtaatctcagctactcaggaggctgtggcaggagggtcgtttgaacctgggaggtggaggttgcagtgagccggtattgcaccactgcactccagctggggcaacagaaagacaccctgtctcaaaaaaaagaaccagtgttcgtcatcgtcatcttatttccagagtcattgccgcatcctatgataagacagtgagggcctgggacctggagacaggcaagctgctggtacgtatgcctgtccagtgggggcgttggttgcagcccaggggcttgaccaagcctcaggcagctttgggttggaccctgggtagggggaggtgataaaactccattcttctaggaaggaggcatgttcctggggatggaagtacagatgtgaactgcacccacaacagccattgcttgcaaaaagtctggagggtgagagggtgggcactgggggaggaagactcctggaggaggcggatggaaccaaggcttctgcttgaaagatgggatgggtttggatacacagaaagaagccagaattgggggtggggtgtgggggctggtattccaggctccccggtaagatgtttggatttgattagacaggaagtggggctgaggccatgggacaaaggccatgtgcccccaagaaccagggttctggcccttaccagtctgttctctttatatcttggagggggtcactctccgtccatcccacaggctcaagactcccactcggccctgcaccccttccaggcaccctcagctctgctcaggggcctcctcggggtctcctgcctcacccctgccgtccctccctctcagctcctgcaggccttttctgtcccttcctccttcctttccttaaaaaacaacctttcttgttagtgcaaaggtcagtttgtattcattgtaaacatttttagaaagacaagataagccaagtttttattttatgatgacgatgatgatgatttttagagacagggtcttgcaagctctgtcacccaggctggaacacagtggcgccatcgtagctcactgcagcctcaaactcctgggctcagatgatcctcccgccacagcctcataagtagctgggactacaggcgagcaccgccacacctggctcatgttttacttttgtagagatggagatcttgcatgtttcccaggctagtctcaggctcctggtctcaagcgatcctccagccttggcctcccaaagcactgggtttacaggtgtaacacaccacacctggcttaaaacaaccttttgattgctggctcatttcagtggaaggtcaggtatgataccttcatcgtctcctgtaagttttctcctgatggtaaatacgtggtctcaggcttcgacgtggatcatggaatctgcataatggacgccgagaacatcaccaccgtttccgtcatcaaaggtgagggtgtgcgggctccctgtatcttcagtctgccataggaatagccacttgtcactgactgacggtgaccttccattgctttatttggtgaaactgtaatggtatgaagcacgtcattaaagctgggacactaggctaggtgcggtggctgggattgcatctgtaatcccagcactttgggaggttgcttgagcccaggagtttgagaccagcctgggcaacagggtgaaaccctgtcactaccaaaaacaatacaaaaattagccaggtgtgatggcatgcacctgtagtcccagctgcttgagaggctgaaacgggagaatcacttgaacccggaggtggagattgtattgagctgagattgagccactggactccagcctggcagacagagtgagactccatctcaaaaaaacaaacaaacaaacaaaaaacaaacaaacaaacaaaaaaacacaccaaaactgatcctcttcagttaatgcttttccattcattcagtcttgtgcttttaacaaaggacacaatgttcggctccaacctcatgtggtcattgacagcctaatcttttattgaggggaggctcaggcttcttaacattaacattaacagagttaacattaacagagtcttgctatgttgcccaggctgatgtcaaactcctggcctcgagggatcctcctgcctcagcctcccaaagtgagggattataggagaagccccctcacccggcctacctgtatcttttttttttttcttttttgagatggagtcttgctctgtctcctaggctggagtgtagtggtgcgatctcgggtcacctcaacctccacttcctgggttcaagcaattctccttgcctcagccttctgagtagctgggattacaggcacccaccaccacgcccagctaatttttgtatttttagtagagatggggtttcaccatgttgggcaggctggtctcgagctcctgacctcaggtgatctgcccgccttggtctcccaaagtgctgggattacgggcatgagccactgtgcccagcctatttttaaaatataggacttagtaattgttgtatgacagtttcctggttgggacactgtgtgatgatgataccacatgttcccatgggggctgctgggtgaaggacatgggtgatttctctgttattccttacacctccatgggagtttacaattatcttaaaattaaagttaaaaaaatgtgtaatcattgtaaagacattcattatgggctgggcgtggtggctcatgcctgtaatcccagcactttgggaggccgaggctggtggatcacctgagctcaaaagttcaagaccagcctggccaacatggtgaaaccctgtctctactaaaaatacaaaaattagccgggcgtggtggcgggcacctgtaatcccagctactcgggaggctgaggcagaattgctggaacccaggaggtggaggttgcagtgagccgaaatcgcgcctctgcgctccagcccaggtgacagaatgaggccctgtctcaaaaataaaaaaatcattcattatgtaaataaaaaagcaaaaggctgctgtgtctgtcctgtctcctccccagaggcacctgttatgaaccatacattgctgggcagtcttcctgaaccctgtgtgtatgcctgtgcgtacaagtgtttgcacacacaacactgcttctcatatgtgctttgtgtttctttttatcgatgtggcactatgccatgtgcactgccccacagcttccctaatagcccctaagagcccacttgacactctgaccccaccatgcttcagactccagctttgccccacactgctccatgatccggcccaggcctttgcaagcactgttccttcttcctggagtgctcttccatttctgcttcccttgctggcttttcgggcccttcctggacccctcagggtggccaggcttatgttgtctgggccttggtggcccgtgcactcatctcatgatctgtggcatgtggcaggtcgttgcctggtccggggtgtctcctccatcagactggcagctctgcgggggcagggaacctgctgtgctcccggttcaaagcctgggacatagtagtcactcaggaatgtttgtgcaggtgtgtagctcctgatgaaaactggaattgtgttttgtaatcgtcactggctggggaagtcgtgggagtcctccagcccagcaggtggaaggcgtggtctcaagtccctttcctccgtgttctgcagatcatcacacaaggtccatcacgtcatgctgctttgaccccgacagccagagggtggcttctgtctcattggacaggtgcatcaagatctgggatgttacatcccaggccacgctgctcaccatcactaagtgagttggaccccaggaggccagaagggagtttgggtggggcgtccccattcatgacttcctgaattccacataagccagcatccatgtggacacgtctgtagcttggtcataggtgctctgaggaggctggggacaggcaggcaggagggagccatcagctgtggcctgtgggctgggctgggcctcagatgcatttgtttcaatgtgagccactagtggaaatcattgtgcagagaagtccacaaaaggtgaagttccagcatctcctgtaaaatgggaaggtctggctgggcgtgtggctcatggctataatcccagagctttgggaggccaaagtgggaggatcacttcaggccaggagttcaacaccagcctgggcaatgtcacaagaccccatctctacaaaaaatttaaaaattagctgggtgtggtgtcacacacctgtagtcccagctactcaggaggctgaggctggaggattgcttgagcctaggagtttgaggctgctgtgagctatgattgcaccactgcaccccagcctggacaatgaagtaagaccctgtctaaaaaaaataaataaataaagtgaattcagtcgttttggagatattacattatcatttaaaaaaattttggggctgggctcggtggctcatgcctgtaatcccagcactttgggaggccgagtggggcggatcacctgaggtcaggagttcgagaccagcctggtcaacatagtgaaaccccacctctagtaaaaatacaaaacttagctgggcgtggtggcgggcacctgtaatcccagctattcaggaggctgaggaaggagaatagcttgaatccgggaggtggaggttgcagtgagccaagattgtgccactgcactccagcctaggtgacagagtgagactctgtctcaaaatatatatatatatatatacacgcacacaacataaaacatgatattttaaccatttttaagtgtgcaattctctgccattcattacattcacagtgttgtgcaaccatcaccactatttatttccaaaatgatttcatcatctcagacagaagctcttacccgttaagcaataactccccattccccatgcccccagccctgggtaatgtttattctactttctgtctctatgaatctgcctattctagatatttcatataagtagagtcatacattatttgtcctcttgtgattaggttatttcacttaaaataatgtcctcaaggttcatctgtgttgtagcctgcatcagaacatcagaacttcattccttttttttcctttgagacttagtctcgctatgtcccccaggctggagtgcagtggtgccatcttggctcactgcaacctctgcctcctgggttcaagtgattctcctgcttcagcctcctgagtagctgggattacaggcgcccaccaccacacctggctaatttctgtattattagtagagacggggtttcatcatgttggccaggctggtctcaaactcctgaccttgtcatccacccacctcggcctcccacagtgctgggattaagaacttcattccttttgatgactgaatagtactgcattataggtgtacataccacattttgtttatctgttcatctgttgatgacctcttaggctgtttctaccttttagttattgggaataatgctgctatgaacacatgtacatgtaactttgagttcctgctttcaattctttttattttatttgatttcgagacagagtcttgctctgttgcccaggctggagtgcagtgacgtgatcatagctcactggagcctcggattcctaggctcaagtgatcctcttgcctcaacttcctgagtagctgagactacaggtgcacaccaccatgcctggctaatttttaagtttgttttttttttttttttgcagaaacggggtctcattatgtctcccaagctagtcctgaacttctgagctcaagtgatcctctcactttggcctcccaaagttctgggatgacaggtgtgagccactgcacctggcctgtttttaattctttactctgtatacccaggagtggaattgttggatcatatggtaatactgtgcttagctttttcaggagtggggatcttgcttattaattttgcactgagaactgaaaatgatatagcccgaccgacattatgaattttttaaatcctctagcaagatcagctatatcatttgcagggtgcaatctcggctcgctgcaacctccgcctcccgggttcaagcaattctcctgcctcagcctcccgagtaggtgggactacaggcgcccgccaccatgcccaactaatttttgtatttttagtagagacagggtttcaccacattggccaggctggtctcaaactcctgaccttgtgatccacccacctcggcctcccaaagtgctgggattacaggcatgagccacagtgcctggccacactgtggttttcatttacactgtcattcatattgtttttctcctataggtaaaaagtcatttctctcttgctgctctgaagatatttttgttgtccttagttttctgaagtgtaattatgtgtctgggtgtagatttctttggatttatcctgttgggttttactcagattcttgaatctgtaggtttatatattttgccaaatttggtaaaatttcagccatttaaaaaaattacttttaaagttgactccatcttgtccagaactgtacgtgcagcatagccattttccccaaacttctgtacaggtgaaatggccttctacgagaagtgggatttatgtgaaatgagagtccatagagatacctctggtttatttatttatttatttatgtatttatttatttagaaattgctatgtctttttttttactttaagttccaggacacatgtgcagaatgtgcaggtttgttacataggtacacatgtgccacggtggtttgctgcatctatcaacacgtcatctaggttttaagccccgcatgtgttaggtatttgccctaatgctctccctccacttgcctcccaccccctgacaggcctcagtgtgtgatgttcccctccctgtgtctatgtgttctcactgttcaactcccacttatgaatgagaacgtgtggtgtttggtcttctgttcctgtgttagtttgctgaggatgatgtccctgcaaaggacatgatctcattctttctcatggctgcatagtattccatggtgtatatgtaccacattttctttatccggtctatcattgatgggcatttgggttgacacgaagtctttgctattgtgaataatgctgcaataaacatacgtgtgcatgtgtatttatagaagaatgatttataatcctctgggtatacctctggtttaaacctcaatgacagtgtctggctgctgggagagcttgcagtcaaacctccatgatatgccagcatggttcttagctcaccaggcactgggaattggtgaggtttatcccggatggccctgcgaagttgacatttcttctcctttggcgttgctcagtttgtgcctttcaaagaaccaaaatgggttccaaaactctgatctgagctctagaaaattgttttgctcaaccttttcttcaggtcaaatgattgattttatgatccaggctactcagagaaaactctgcttacaagaggaggtgagaatcacaggagaaagacattgagggttacaaacaaaaagtggcaaaatacagacaggctttttattattattatttttctgaaaaagaagatgcttaaaaattggaatgaataacttcattttttttctgagatagagtcttgcactgttgcccaggctggagtgcaatggcacaatcttggctcactgcaacctccacctcctgggttcaagtgattctcctgcctcagcctccagagtagctgggactacaggcatgtgccaccatgcccagctaatttttatattttttgtagagatggggtcttgctatgttgcccaggctggtgtcaaaatcctgggctcaagcaatccttccacctaggcctcccaaagtgctgggattataggcatgagccactgcacccagccaaataacccacaattttattaattaaatatacaacactgaaatatacttgaatagcactgaagacaaatgaggataggagtgagaaaaagggagagtgaatagttggggtggagaagcagaggagtaagtaagagaggggtggaacagggggagaccacgcctgacattgttgggggaaagatggggagcaggagagagcctctgtgtaagcgccacccagcaccaagccccaaaggctgtctgtcaatcaatcactcctgacaccagctgcttttccctccagcgccaagggaatactgcagaatcttcccaaatgagggcaatttgtgccccagtggacatttgacaatgtctggactcatgttttgttgtcacaactgggtgtgggggttcctggcatctagccaggagaggccagggatgctgctccacctcctacagaacacaggacggcccccacaactctgagtgacccagctcaaaatgtccaccttggtgtggttggcccagtgccgtggctcacgcctgtaatcccagcactactttgggaggccaaggcaggtggaccactagagcctaggagtttgagagcagcctgggtaacatagcgaaacactgtctctattattatttttctaaaaattggtgcagtcgagaaatgctggaacagcgtgacagtctgagcaattcacatctggaccatggtaggcagtgatcaaaggcatgatgaacatgagctcacaggagatgctgacccccacttaggtatgtcttcaggtcctcttggggcgaagtgctagcatgtgcagcccgaccatgagctcacaggagaaaatacccccggctttaggtatgtcttcaggtcctccaggagcaaagcgctaatgtgtgcaccccaccatctgtgtttcagggcacattccaatgcaatctcaaactgctgttttaccttcagtggccatttcctgtgtacaagctcctgggataaaaacttaaaaatatggaacgtccacacaggggagtttcgaaactgtggagcctgtgtgactctgatgcagggccatgaaggttctgtcagttcctgtcactttgccagagacagtgagtaattaacatgcagaaggcctccattcctgtgggagtgctgggcagagttctccatgttccgttcaaatggacagagaggcaatttccaatgatgctgacagggagggcggattcttccccacgagaacaaaaaacccaagagggaagaccacaggtaccagtttacagtggtagaaactcagctcaatgtggcgtatgcaaccaaagaaattgattaatcctgtaatggaaaagtccaagagcacgtctgacttcaggcatggatgggacaagagagtcaatgctgttgggaacccaacccttccactctgtctttcaacctagcttccctctgtatcagcctttacccccaaggaggcaaagatggccggatgaggtgccttatgcctgtaatcccaatgctttgggaggccaaggtgggaggactgcttgaagccaggagttcaagaccagcctgggcaacacagcaagaccctgtctctacaaaaaaattaaaaaattagctgggtgtggtggtgcacacctgtagtctcagctcttcaagaggctgaggtgggaggatcacttgagcccaggagtttgaggctgcagtgagctatgattgtgctactgcactccagcctgggcaacagagtgagaccctgtgtctaaaaagaaaaaaaaaaaggccaggcacaatggctcatgcctgtaatcccagcactttgggaggctgaggtgggcggatcacctgaggtcaggagttcaagatcagcctggccaacatggtgaaaccccatctctactaaaaaatacaaaaattagccaggtgtggtggtggatgcctgtaattccagctattcgggagcctcaggcaggagaatcgcttgaacccgggaggcggaggctgcagtgagccaagattgcaccactgcactccagcctgggtgacagagcgagactctgtctcaatatatatatatatgtatatatatgtgtatatatatatatatgtatatatatgtgtatatatatatgtatatatgtgtatatatatgtatatatgtgtatatatgtatatatatgtgtatatatatatgtatgtgtatatatgtgtgtgtgtatgtatatatgtatgtatgtgtgtgtgtgtatgtatgtatatatatatatatatatatatatatatatatatatatatatatatataaaattaaagaggtaaagaggacctttagtggtccagctcagcctagttctggcccctggcagtcctggagaaagagaccttctgtctgatggtgccagaacaagtcccagggaagactcccattggctcagcttgggacacatgtccatctcttaatgaatcacttagggggcaacgaaagcctctgattggccaggtctgggtgacttgcccacctgcagagctagggttggggtcagaaccccctgatgcagagggactaagagtaggcaaggagtgtttccccacaggaaattgggagctgttgccagataaagggacatagaggtgaatgggggcagtgacaggaagccaccgcggctagccagctccagggagggaagtgggtgctcttgacactcaggagccaaacatatgctcccctatcctggtgagaagtggggcttgctctgtgtgtctgggggcctcagctggcacacatgccactggggcctggcttgagaagcactagggtgcttctgggcaactttccctcttcagcagcaccccttgtctaagtcccactgtgaggcaccctgccagcttctgtccttggctttatggggttcagaatcacatgcagttgagccaaaattgtgccactgcgctcctacactctagcctgggtgacggagtgagactctgtctcaaaaaaagaaaaaaagaaagaaaaaaaaaagaatcacatgcagttaatcattattattcctgattctgtatttgtgaagtcacctacttgctgatatttatttgtaaacctaaagtcaacattcatggcactttcaaggtcactcacagatgtgaagagcagcaaaaaatctaagtcacctcccagctgaggttggacaaggcaacactctgccttcttgtttcacctcccacgtggtaaaatgtcctttttgtggtctatttagtgccaccatttttttttgttgttgtttgtttgttttgctccctctgttgcccaggctggagcgcagttgcgcgatcttggctcactgcaacctctgcctcctgggttcaagcgattctcctgcttcagccttccaagtagcttggattacaggtgcgcactaccatgcctggctaatttttgtatttttggtagagatggggtttcgccatgttgtccaggctggtcttgaactcctgtcctcatgtgatctgcctgcctcagcctcccaaagtgctgggattacagacgtgagccaccacacctgggctttcttttgctttttgttagtgattttgctgtgtaaaatggctcccttggccgtgtgtggtggctcacagctttaatttcagtgctgggggggtgctgaggcgggagtattgcttgaacccaggagtttgagatcagcctgggcaacatagtgagaccccatctctaccaaaacaaaaaaaaaaaatttagccaggtgtgctggcacctgcttgtagtcccagctacttggtaactgaagtgggaggattgcttgagaccaggagtttgaagctgctgtgagctgattgcatcactgcactctagcctgggtgacagagcaagaccttatctctaaaaataaataaataaataaataaataaataaataaataaataaataaataacaaataaaatgatccctaaccacagtgccgaagtgctgtttgccgttcctaagcgcgagagtgctatgatggggaaaatgcatgcatccattcaggcatgagttacagctgttggttgtgagttcaatgtaaacaaatcaacagtatatatgcaataaggtgtctttaaacagaaacacacataaaacaaagttacgtactgatcaactgatgagaatgtgaccagagctcgcaggaaactgaccctgtatttcccctaggagcgatggttcagtattcactaattcagtgtctgcaaaaactgcagaggcccccaacctttctggcgccagggacaggtttcatggaagacaacttttccacaaatgggagctgtggaggatggtttcgggatgacccaagtgtattacatttattgtgccctttatttttattattattacattgtaatatatagtgaaataattatacaagtcagcatcatgtagaatcagtgggagccctgagcttgttttcctgcaactagatggtcccatctgggggtgatgggagacagtgacagatcatcaggcattagattctcataaagagtgcacaacctaatccctcgcatccgcagttcacaatagggttcatgctcccgtgagaatcgaatgctgcagctgatctgacaggaggccgagctcaggtggtaatacgagcgatggggagtggctgtaaatacagatgaagctttggcttgcttgcctaccactcactgtctgctgggtggcctggttcccaacaggccatggattggtaccagtctgtggcccagggactggggacccctgtcatagaacatgactactgtaaatgataagaatcagctgtaattggcttggggtcgtggagccactccaggaaggggtttcagtgttgtcagagtgagatgaggtggtgcctcgccaaggcatcttcagctggctttgggctcacttggcttggaaagttgacccccatctccaccctttcattttctgttgcaggctcttttctcatttctggagggtttgataggactgtggctatttgggatgtagcagaaggctaccggaagctctctttgaaggtacatgtggccagcatgagattgaggatctgaacttccctcccgagtccttcctgtgctcaatgctggttgctggggacacagctgtgagtgacacaggccttgatgcctctgtgggctgatgaaggacagacaggaagccagcaaacacaccaccgactgtgaggagtgaaatggagaaaccacaacagggtgacatgatggggacagaggcgggggacccatccacattgcatgggcagagcttcctggagaaggaggtgtttgagctgagaacagaaaggactacataagtggggatcttgaagaagaagggcagtccaggcagatggaacagctgatgcaaaaaccctgaggtgggagtgtctaagaacagcagaagttactgtgcaggcctgggcactgtggctcactcctgtaatcccagtactttgggaggctgaggtgggcggatcacctgaggtcaggagtttgagaccagcctggccaacatggtgaaacccccgtctctactaaaaatacaaaaatcagccgggtgtggtggtgcaaacctgtagtcccagctacttgggaggctgaggtgggaggatcgcttgaacccgggaggcggaggttgcactgggccaagattgtgccactgcactccagcctgggcgatagactgagattctgtctctaacaaaacaaaacaaaacaaaaaacagaaattaccttgaagagagacgcatgccctagtgaggcatgcacagaaagcttggggttccaaaatggggatgtcaactgaatgctctgggctacaagtgagaggatgagaggagccccaactcagagtggctctatgatacggggatgtgttatccaacacagcaagaacccacaattgcctcatgctgtgcccctgttcccccaaggggccccacaccccaggatttctgcatactccctggtttcacgatctcactgtcacctttggctgtgaatgcgtgcatccctgattcttggtctttctgttcccagggacacaaagtagacatgtgtccttgagcagcccatattcaggtccctggggctggtctatctgagctgtcttctcctaggacttggggagacaaagcgagtttcctcacagcaaataaacggattaaaatggaatgttaaacctctctgtgcttaaagtccctctgtcatctaggcacagtggctcatgcctgtaatcccagcactttgggaggctgaggctggaggatcattggaggtcaggagttcgagaccagcctggccaacatagtgaaacaccatctctactaaaaatacaaaaattagccaggtgtggtcatgcccacctgtagtcccagctacttgggaggctgaggcataagaatctctagagcctgggaggcagaggctgcagtgagctgagattgcaccactggactccagcctgggtgacagagccggttgttctattctctctcctcttctctcctctttctctgtgctcccatcctcaaattcctgtcctttaattacactaagcggtttaaccttccctctgattcctttttctctaaccacactatggcctcactttctgcctctttccatacggggaaggccaaagaaggacagagatgctggcataaagcccagacatcattcagtgtctgaggcagcaatggcagctatctgctctgagctgttttttttgtttgtttttttttgagacgggagtctcgctctgtcgcccaggctagagtgcagtggcatgatcttggctcactgcaagttccgcctcctgggttcacaccattctcctacctcagcctcctgagtagctgggactacaggtgcccaccaccatgcccggctaattttttttttttaaatttttattttttagtagagatggtgtttcaccatgttagccaggctggtctcgatctcctgacctcgtgatctatccgcctcggcctcccaaagtgctggcattacaggcatggagcaccgcgcccggcctgctctgagctcctatgtacccaaagaaaacaccccactccttctctgcttaagccacagtggatcgagtttgcagttattggaagcgaaaagccccctcacttacagggcctctgaggggtatttcctagaacaaagaatgcaaatgaaaacctgagaccagctgggaatataatatttctcccccaatcttgctaaacacccgagtactattttaaaaaaccatacacagtggcacacacatttgtagtcccagctactcgggaggctgaggcaggagaatcacttgagcccaggaggttgaggctgcagtgagctatgattgagctgctacactccagcctgggggacagagtaagaccctgtgtcaaataaaaataactaaataaataaatatagaatgggtagggcgcagtggctcatgcctgtaatcccagcactttgtgaggctgaggcaggtggatcacttgaggtcaggagttcgagaccagcctggccaacatggtgaaactccatctctattaaaaatacaaacattaggtggggtgtggtggctcacgcctgtaatcccagcactttgggaggccgaggcaggcagatcacgaagtcagaagatcgagaccatcctggctaacacagtgaaaccccgtctctactaaaaatacaaaaaattagccgggtgtggtggcgggcgcctgtagtcccagctactcgggaggctgaggcaggagaatggcgtgaacttgggaggcggagcttgcagtgagccgagatcacaccactgcactccagcctgggtgacagagcgagactccgtctcaaaaaaaaaaaaaattagctgggcatggtgatgggcacctgtaatcccagctacttggcaggctgaggctggataattgcttgaacccaggaggtgaaggttgcagtgagtggagattgcaccattgcactccagcctgggcgacaagagcaaaactctgtctcaaaacaaacaaacaaacaaaccccaaaaaacaacaacaacaaaaaaaatagaatgtacatatatcacatgtctttacactttgtattccaccctaaatgttgttgatgaaaccgaggaagtacaatgagctgctctgctctttccttttttttttttttttgagacagtctcactctgttgcccaggctggagtgcatgatcatgactcactgcagcctcaacctccccgggctccggtgactctcccaccttagcctcctgagtagttgggattacaggcgcatgccaccatgctcggctaatattttgtatttttagtagagatggggtttcactatgttgcccgggctggtctcaaactcctagactcaagcaatctgtccacctcaacctcccagagtactgagattacaggcatgagccactgcactcagccagctactcttaaatgtaagcaacactgggttcttgactttttgttgtttttttagatatgggacctcactctgttgcccaggctgaagtgcagtggtgcaatcatggctcactgcagcttccacctcctgggctcaggtgaccctcccgactcggcttcccaaaaggcaggttacaggtgtgagccactacacccagcttgtttttgttgttctttcaaaattattttctccacgttttcattaaaatttgatatttcttcagggccataatgactgggtgatggatgttgccattagcaacaacaagaaatggatcctgtctgcttccaaggtaaaagtggtcaagcttacaatatcgatcacgttcgccaggattggtgatagtggaagagttattgccaagtataaaattcctgggtgggttcggtgagctgtacctgaccgggccatcgtgttcacggagctgcctgggaatgtggacagcatgtccttctatgcgcaaacgcgatgagtttggagtttccaggtatttctgtgtctgtaccgttgacatttgaactttgttggaaaaagagtctggctggatcagtgagcaatggagccaatgggggacttgaagggaaagcatcaactcatggataagcctttgacactgcccaaggtccgggggggtctccctttcctgcagcactgcatcttgagattcccattccactggcacatagcagccagcccaggatatcccaacagctgtcctgcaggtgtgaaccccggagaagtggggacctactccgccctccacccatattagagcagcagtccccaacctttttggcaccagggaccagtttcgtggaagacaattattccatggttggggggcgggggatggttttgggatggtgcaagagcattacatttattgtgcactttattattattacattgtaatatattatgaaataattatacaacccaccattatgtagaatcagtgggagccctgagcttgttttcctgcaactagatggtcccatctgggggtgatgggagacagtgacagatcatcaggcattagattctcataaggagcacacagcctagatcccttgcatgcacagttcacaatagccttcgtgctcctgtgagaatctaatgtggccactgatctgacaggaggtggagctcaggtggtaaagctagtgacagggagcagctatatatacagatgaagcttcacccctgctcacctcctgctgtgtggcccatttcctaacaggccacagactggggggtcggggacccctttatttgagcatgtcatgttctaggctagaggtttctaaatccaggagactgtgggagaggcgctgcctagcatgatcaacttttcagagagccaacttggaatacaaacatatcagaaaaaaaaaacaacaaacccataataatacaatatatagcaaaagattatatgcctatatgttactactttaatataaaaataagaagtaaaggtttacttgaaattatacattattttatattttttacttttttgttccatgaatattattatttaagcaaaacaacaggactagtgaacagcgacaattagtagtaattaacagtagggcaaattaaacaaatatgtttgagaaaaatataaaaatattggccaggtgaagtggctcacgcctgtaatcccagcactttgggaggccgaggcgggtggatcacctgaggtcaggagtccgagaccagcctggccaacgtggtgaagccccgtctttactaaaaatacaaaacttagccgggcgtggtggcaggtgcctgtaatcccagctactcgggaggctgaggcaggagaattgcttgaacccgggaggcagaggttgcagtgagccgagatcacgagatcaagccatggccctccagcctgggtgacaagagcgaaactctgtctcaaaaaaaaaaaaaaaaaaattatgtttctttctattctttgatacagtactttagtgttactttaaaaaaaatcttggctgggcatggtggctcatgcctgtaatcccagcactttgggaggttaaggtgggaggatcgcttaagtccaggagttggagaccagccttggcaacatagtgagacgctatctctacagaaaaactttaaaaaattaaccgagtgtggtggtgtgtggctgtagtcccagccactccaggtccagctacttgggaggctgaggtgggaggatggcttgagcctgggaggtcgaggctgcagtgagtcatgatggcatcactgcactccagcctgggccaaacagtgagactggttgtggtctcaaaaaaaaaaaaaaaaaaaaaaagctgggtgtggtggccactcacgtctgtaatcccagcactttgggaggccaaggcaggcagatagcttgagctcaggagtttgagaccagcctaggcaacgtggcaaaaccctgtctctataaaaaattagccaagcatagtgatatgagcctatattctcagttactccaggcccagctacttgggaggctgagatgggaggaatgcttgagcttaggaggttgaggctgcagcgggctgtgatcatgccattatactccagcctgggcgacagagtgagaccctgtctctttaaaaaaaaattattgaatatttaaacttttggctaggcgcagtggctcatgcctgtaatcctagcactttgggaggcagaggtgggaggtctgcttgagcccaggggtttgggaccagcttgggcaacatggtgaaaccctgtctctaccagaaatacaaaaaatagctaggagtggtggcgcacacctgtagttccagctactcactcaggaggctgagatgggaggatggtttgagcatgggaggcagaggctgcagtgagccacaatcatgccactacattctatcctgggtgacagagctagaccctgtctccaataaataaataataaattttgtaggttatattatatattcttaagatatatagaggtaagactgtttaaaaaagagaacacaaataaaataggattgattaaatacatattacttatatttaatgtaaagcagtgacttcattctatgaggccagcacaagttggataccaaagccaagaacaaacatgacaataaaagaaaattacagaccaatatctcatattaatatagatgcaaatatgctcaacataatattggcaaataaaatccaacagtacattaaaaggattatttaccatgaccaagtgggatttatcccagggatacagggtggctcaacataaaatcaatgtaatatattacattaatagaacaaagggaaaaaaaaccctatacaatcatttcaactgacacagaaaaggcatttgaaaaaattcaaaaccctttcattataataataaaaaaacccagaaagctaggaataaagggataattccgcaacatgataaagagtgtttagaaaaaatctgcagctaacatgattctcagtggtaaaagactaaaatttttcttccctaagatcaggatcaggacaaggatgcctactttcattgctactattcaatattgtactggaagtgctagccggagctatcagacaagaaaaagaaataaaaggcatccaaattgaaaaggaagaggtaaaattctcttcctttccttccctccctcccaaccttccttccttccttctcttccttccttccttctgtcctttctttcttccttccttcaatccttccttcctgccttccctcctcttttctcttctctcctctcctcctctctcctctcctctctcctctctctttctctctttctttctttctagggtctcattctgtcacccaggctagagtgcagtggcacaatctcgactcactgcaacctccatctcctgggttcaagcaattctcccggtagaaacgggatttcaccatgttgtccaggctggccttgaactcctgacttcaagtgatctgcccaccttggcctctcaaagtgctgggattacaggtgtgagccaccatgcccagccaaaatgatttctttctttttttttttttgagatggagtcttgctctgtcacccaggctggcgtgcagtggcatgatcttggctcactgcaacctccatcttctgggttcaagcaattctcctgcttcagcctcccgagtagctgggattacaggcatgtgccaccatgctcggctaatttttgcatttttactagagatggggtttcaccatgttggcaagggtggtcttgaactcctgaccccgtgatccacccgcctcggcctcccaaagtgctgggattacaggcatgagccaccgtgcccggccccaaaattatttctattcataggtggcatgatcgtaaatatagaaaatcccaaagaattaacaagaaagctactaaagctaataaatgaattcaacaaagtttcagggtacaaaatcaacacacaaaaaagcagttgtgtttctatacaccagcaatgaacactctgaaaaggaagagcaattccatttacaatggcatataaaacaatacttaggaataaatctaacaaaggtggtgaaagactggcacaattaatactataaagtattgctgaaagaaattaaagaagacttgaatgaatggaaagacatcctatattcatggataggaagactcatcattaagatgtcagtactactcaaagtaatctacagattctgcataatccttatcaaaattccaacagcattttcatatgaaattgcaaggggccccgaatagccaaaagaatcttgaagaaggagaaggggaaggagaagaataagagggagaaggagaagaagaaaattggaggactcacactttctgactttgaagttactacaagtctacagtaattaaaacagtgtagttctggcatagggacagacatatagacaaatggcttagaatagaaagcccagaaataagggatttttgacgagggtgccgagaccattcaatggagaaagggcagtcttttcaacaaatggtgctaggaaaattggaaatttacatgcaaaagaatgaaattgcacccttacctaatactgtatagaaaaattaactcaggatcaaacaccttaacttgagagctaaactataaaacccttagaagaaaacagtggagaaaatcttcatgatactgactttggcagtgatttcatggatatgacaacaaaagtataggcaatgagagcaaaaacagacaaactaaacttcgttgaaattaagaacttttgtgcatcaaaggatactgtcaagaaagcaaaaagacaacttagagaatgggagaaaatagttgcacatcatgtatctgataagggattaatatgcagaatacataaagaacttcgaaaactcaacaacaaaaaacaaacaacccatttcaaggatgggcaaaagactcgaataggcatttctccaaagaagatatacaaatggccaagaagcatatggcaagatgctcaacatcattagtcattagggaaatgcaaatcaaaagcacagtgaggtatcacttcacatctattagggggtctataataaaagaactcagaaaataatgaatgttggcaaaggatgtggagcaactggaacccttgtgcctgactgatggtgacagagtgagacccagtctcaaaaaaaaaaaaaaaaaaaaaaagattttacttactggcaacaacaggttttttgatttgtaggctttatttcccagcactccaaaagtgttcaatgtactaaatctataagcttgctttgaaagaccaggtatttgtcaatgaagtcctttgcactataaattcacggtataggctatatctatctaaaatgtgcattatttatttattttattttattttatttttgagatggagtttctctcttgttgcccaggctggagtgcaattgcacaatcttggctcaccgcaacctccgcctcccgggttcaagtgattttcctgcctcagcctcccgagtagctgggattacaggcatgcaccaccacgcctggctaattttgtatttttagtacagacggggtttctccatgttggtcaggctggtcttgaactctcgacctcaggtgatccacccaccttggcctcccaaagtgctgggattacaggcgtgagccactgcgcccagcccatttatttatgttttaaagagacagggtcttgctgtatcgcccaggctggagtgcagtggcatgatctcagctcactgcagcctgaacctcccgggcttaggcgatcctcccgccttagcctcccgagtagctgggattacaaggtgcccgcgatcatgcctggctaattttttgtatttttagcggaggcggggttttcccatgttgcccaggctggtctcaaactcctggccttaagtgattcgaccgcgttggcctcccaatgtgctaggattacaggcatgagccactgtgcccggcccattttgacatcttttctatggtcagaaatgataatagccatcttgtaggcacatgtttaaggaagatatctctttccatttctctaattgaaaatcttggctgggcacggtggctcatgcctgtaatgccagcaatttgggaggctgagatgggcacattgcctgagctcaggagtttgagaccagcctgggcaacgtgcccaaaccccatctctactaaaaatacaaaatattagtggggtatggtggcgcatgcctgtagtcccagctattcggggggccaaggcaggagaatcactggagcctgcgaagcggaggttgtagtgagctgagggcatgccactgcactcgggcctgggtgacagagtaagaccctgtcttaaaaaaagagaaaaaaagaaagaaaaaatctcattaagtgcttctgtacatttcgaggaaggtgaaaagtggccccaaacacactataggtgtgtatcaccacacccagctaaataaaaaatattattattattatttttttgagacagagtctcgctctgtcacccaggctggagtgcaatggtgcgatctcggcttattgcaaactctgcctcccaagtttaagtgattctcctgcctcagcctcctgagtagctgggattacaggcatgcagcaccaggcctggctaatttttgtatttttagtagagacagagtttcgccatgttggccaggctggtctcaaactcctgacctcaggtgatccgcctgccttggcctctcaaagtgctgggattactggtgtgagccaccatgcccagcttgaaactaacttttgaattaaagtatctaagagctgggaggatgttttttgttgtcatgatttgacaaaccacttgctatactgtaggaagtatgcttattggtaagatctgacagctttaggcagcatgaagtcaacacatctgttacaaaaatgacccctttgttctcccacaggatatttagttgcaactgctgaatcaagaaatgtaacatactcaatgtatccatttttttattgctgctataataagttaccagactgtactgtttaaacattaaacaacataaatttaatatcttacagtactgtaagatagaagtctgataagctctcactgggctaaaatctaggtatcaacaggactgcattcctttcaggaactattattaactaaggtccatggttttatagtttcatgctttgtgttactgtatatttttgccaaatgcatatcatatatccaccaatacagtgtcatatagttttgtttgtttgtttgttttgagacagagtctcactctgtcgcacaggcttgagtgcagtggtgcgatcttggctcactgcaacctccgcctcctgggttcaagtgattctcctgcctcagcctcccaagtagctgggactacaggtgcacgccactgtgcccagctatttttgtatttttagtagagacggggtttcaccatattggtcaggctggtcttgaactcctgacctcacccaccttggcctctcaaagtggtcggattacaggcatgagccaccgcgcctggccatacagaatagttttactattcatccctcctcctcttccctataatcctgggcaatgactcatctatttatattcttcagttttgccttttccagaatgtcatatggttggaattatactctgtagcctcttcaggttggcttctatggcataacaatgtgcattgaaggttcctctgtctttttgtgccttgacagcccatgtcttttgattgttgaatgacattcctttgtatggatgtaccacagcctgttttgtgaccgctggtttgctatttgttttaggataggaccatgagactgtggaatattgaagaaattgatgaaattcctttggtaatcaagtacaaaaaggccgtgggcttaaagttgaaacaggttggtattgggtaaaattaagcccagtgaaggctttcgttagttccctctataaattaatttatcatttgaatgaactttgggcacctggagatgcaatcgtgaacaaacagactgacatttttgccccaggggagcttaaattctaagagaggaaacaaagaggaaagacacaagaaaaatgtgtagtaagtctcatggtgataagtaattgacagaaaaatacatagcaaacaggagtaggagtgctggaggttgcaagattttaaagggtggtcaggataggtctcattgaggactgacagctgtgtcgacttgaaggtggtgagggggtgagccatgcagatatttagaggaaagaacttccagctggatgcggtgtttcacgcctgtaatcccaacattttgggaggctgaagcaggcggatcacctgaggtcaggagttcgagaccagcctggccaacatggttaagtcctgtctctactacaaatacaaaaaaattagccaggcttggtggtgcacacctgtactaccagctactcgagaggctaaggcaggagaatcccttgaacctgggagatggaagttgcagtgagttgagattgcgccactgcactctagcctgggtgacagagcgagactctgtctcaaaaaaaaaaaaaaaaaaaaaaaaaaaagagaagaaagaacttcccagcatagagaacagccaatgcagagagagcctgagaggcaggagccagcctggtgcatcggaggggtggagtgagggggcttggaggggatgagacctgcaggagcactggtcagtggaggaatggccgggtacacagctgggcactgcgtcagcctcctaccctgggcaggtccccagtgccccacttcccatgcaaaaggcttaggtgcctgcgcttctctagtgcaagagcttggtggtcaggccagcatattttctgcttcaccaggcacagctggggctggccacagaggctgtccctgggcagtggaggcaactctccgctggagcctctctgtgcacacacctggctgctgccttggagtgcaggctgggcccctttaagtccttccctgggaatcctggagctgcctagacttggcctcctctcagaaggttcggctgggagccactgcttctgggaatggctaatttgggagccgcactgcaaggcagttgtgtgaggggtgggactcacatggaccttgtccctgtttggcccttaaactgtgaaagctgacttgctacagagcagtgatggcccttgtttttcactggccacctagggcaaggcctgggagcctcctcctctgtgagccctgttgttctggggttggaccgtgggatgtaggaatgtaggataaggtaggtaaaggatcaaatttccttttttctttttatttcttttttgagatggagtctcgctctgtcgcccaggctggagtgcagtggcgcgatctcgtctcactgcaacctccgcctcccgggttcaagcgattctcctgcctcagcctcccgagtagctgggactacaggcgcccaccactacgctggctaattgttttgtgtttttattagagacggggtttcaccatgttggccaggttggtctcgaactcctgagctcaagtgatccgcccgcctcagcctcccaaagtgctgggactacaggcgcaagctatccgcacccaaactgggatctaatctatttcttgcaaaaaaggaaaagaaagaggcctacctgaagctgaagcaaggatgagcctgctgcatttgacttgctctgaatcaatcaacatgagaagcctgaggccaggcttccccgaggcctgccccaggtagggtttacccccctctccagcaggcctcagtgtcctggagtgggcagaacagcaaagcccaggggctgggagagccagggcaggggcgcggccaccttgcaggctcttctccaggggaccatgcatggtgggaacccctgaggggcctctgcccatggcctaggagacctcatcccatggcactcttgcttgttagtgggaagcagacgtgatgggtgagctgtgccatttgttttcagtgtactctgtgagctttggccagaaacaggctcagggacgcaggagggcacctagcacctgcatcaatctgcttcacacccctgctttgttcagaaatcttgcctacttgcgtctcatggttctgtaaaagttgggtgttctcaggatgtcagggagtcatcctcttagtcccacaattttactcggcacagaacaatggatggggcgggacactcacccccatcctcccaactgtcaaggggcttgccacgcatgtcctcaggacccccatggcaggagacatgagctggcaggagacatgagctggcaggagacatgagctggcaggacctgcttagccattggtggggaagcagcctgtgctcattctctctgcaatttccgcctttgtggggttagagattccagagaggggctgcgcccagtggctcacgcctgtaatcccagcactctgggctgccaaggtgggtggatcacttgaggccaggagttcaagaccagcctggccaacatggagaaaccccatctctactaaaaatacaaaaattagcaggatgtggtggtgcacgcctgtaatcccagctactcgggtggctgaggcaggagaattgcttgaacctgggaggcggaggttgcagtaagcctagatggtgccactgcactccagcctgggcaacaaagtgagactctgtctcaaaaacaaaaacaaaaacaaacaaacaaaccaaaaagagattccagagaggggaacccttgccttgccccagctcaaggtagctgggagaattctaatggcatgcctggatcacctctgaccagcacctcctttctgctcttttaaaatatcccatgtcagtgcgaaagatgtgacaggcctttctccatcttcaagagtgacacctcttctgaaatgttcacccaatgcgtgttctgccggatagatacaaggggcttgccagcagatacttcatcgtcatcatcatcatcggaaagggagaactcaccgccgccaaggggaagcaaggatgactgacagccacaggcccctttgagtgactccagcacaggctacctagcatgtaggtttcggggctttgcaggggctttctcttgggcccctcccaggctcagcaggcctgtcagactggggcaggacccaagccctggctggactcagcacagtgccacctcctcagctctcagcttggggagtgaacactttccgttttcatgcagaataaatctaattcctttggaaaacaagcgtgcatgtgcatctgaaaagcagtcttgctatttctaagctttatgtcttggtgctcatcctgtttgattcttggaacacatattagactcacattgtggagtctggagttgccctgtaaggtgacctgtgggggctggcaccagcagttctggagagtttgtcaaatgagtatgacaaggtgtggggccccctctgtggacgtgatggcaagacacaatgagtgcctccctggctaatgctcccagatggccacttgcccggagcagaggacggtttggttaggcaagggggtggcggtggcattgccatcacgggatgtctcacgctttctcctctagacgtcttaatttccagaaccccttgcttatgtgcagccctcttcctgctgccacggcattttgcacagcgtgcatcaatccagaaataggctgagataggagcttagtttcctattgcacaccatgctgggtgaacctttctgtgcatgctgcagggatgctgggtggatgggttggcagtgttcggcttcgtagttgcccacaggccctctggaaagtgcggagaccagtggctggtgtagttgcgtgaggacacccagaaggggtcagtgagaaactagggaggggagggccttgcctgctctggcagcagaaacccctccatgtaaggtgttggtgctccacgccagcagcctgggaaccctgaagtccacgatccctcctgagccttccggacccctcgactttcccccagctcaggatccgcggaagtagcgactcaactgaagttatagtcccgggagctggcagggccccgggtcttctcaggctgaggtcgcggggcagaatggtccgaagctcaccggggtcacagtcggaccgaggcgggtgtgcgcctcgaccggacgccaggggagccagcagcccggccgcgctggcggggccgggggttctccggagtgggtaggggctcgaccgcactgccctgagtcccaagccctgcaccagcgttccccaaaggcggagcgtcctggctccacgttggaagagacattaccgtgaccaggaagtctggccttcccaggctccgcccgctccgtgcagcccaagcttccggtctcagtctcagctgcctgtgtgaatcggaagctacactacgcgtgcgccacaacaggccgaatgtgtgcgcatgcgcgcggcccatatggtaaatagtaatgaagaatagtttaggaaagtacctgtacgggtggcgccgtggcttagttggttaaagcgcctgtctagtaaacaggagatcctgggttcgaatcccagcggtgcctcaaccgagcgtccaagctctttccatttttgctcctgcacttttgtgctctgtacccggctgcccgatactatgagggtgtgagcgggatcccgagaggcctaggtagacgggccccccaacggggcgtggcctcggccacgggggcgggtgcaggcgggcttcggactccaccttctcgggtctcaggctctgtggggcgtaggcggcgcggggacccaggcgaccgcggttgccatggtgctggctggccgtgggaggcgagcggcgggctgggaagcagctgtgcgagtccagcgaggagccggtgttcgccccgaggctgcttcctcagggcgggcggtggacgcgctctcccacgccgccttctgtggcgtgggttcctcgcgctagtcttcctggctccaagctgccacttgggggagcccacgcgggtgccgatcctcgacgttcgccgggcttagctgagcctcgcaaaggcctgaagattgcccgtctccctgcagccgcgcagtgggtgcagccttttcacaaatgcaagacctggaccggcggcgaggccaaggggaccccgtgtggagggatgcgggactgagtccggttagcgtgatcctcagtccgatgactgcgtggaaactccaggccaggcaggggactctgccccagctgcagacggccgggtgtgggctgaagccagctgcctgggctggggttggttgctcagcgctggggttctacccacatttgtatgtgggaacctattcctgagcaagtgcattcgaggctttgggggtggtggggtagggtggggtgaggcattggagtttttacaaacattctccagggattcacatgtcaaacccgacaggacagtcccagtgcagaaattgcagtcatggcataggctgtgtagtcaaattcacctgccccagaagcagttcctcttcctgcctcttctatggatctgggtttattgtttttgtttgtttgtttatttctgtcgttttctagtcaattctcgcgcttttgtatcttggttgtttttgactgacattgcctaggaaagcttgtaaggagactttgacgttttgcagtgctgataggagcgttcacctggatccaattagggatgaatttattggaaactgggcttgcgtcattgtggagctggtttatttctggctcatacttacgccactgcaatccagcctgggcgacagagcgagattccatctcgaagaaaaaataaaaattaaaaagtccctcattggatacagggtttgaaatcttttctccgtttccttttctctttgctatttatttatttatttatttatttatttactgagatggagtctttgtcgcccaggctggagtgcagtggtgtgatctctgctcactgcaacctccgcctccccggttcaagcgattctcctgtctcagcctcccgagtagctgggattacaggtgcacatcaccacgcccggctaatttttgcatttttagtagagacgaggtttcatcatgttggccaggctggtctcgaattcctgacctcaggtgatccgccccgcccacctcagcctcccaaagtgtggggattacaggtgtgagccaccgcatttttttttttttgagacagagtctcactgtgtcaccaggatggagtgcagtggtgtgatctctgcccacggcaacctccacctcccgggttcaagcgattctcctgcctcagcctcccaagtagctgggactacaggcgcgtgccaccacgcccaactaatttttgtatttttggtagagacggggtttcaccatgttggccaggatggtctcgatctcttgacctcttgatccgcctgccttggcctcccaaagtgctgggattacaggtgtgaaccaccgtgcccggccttctttgctttcttaatactgtcattagaagtgcaaacgtttcaatattgatcaagtctaatgtatctacttttcctttttgcttatgcttttgatgtcatattcaagactccattgccaagttcaaggtcataaagatttacactaatgttttcttataagggttttatagcttttgctcttacatttaagttttggatctactttgagtcaattttgtatatgatgtgaaggaggggtccagcttcattcttttgcatgtggattttcattcatccaaacgccatttgttgaaaagactattctgttcccaaaggtcttggcacccttgtggaaaatcaattgaccataaatatgagggcttatttgtggttttctaattctagtaccttaatctacatgtctagctttatgcctgtgccacactcttgataactatagctgtgtactaaattttcaaattgggacgtatgaggacttcaaagttgttattttcaagattgttctggctattctgggtctgttgaatttccatgagttttagaatcagcctgtaaatttctgcaaacaatccagttgggattttgatagaaattgcatttgatagaaataaatcatttggggggatattgttatcttaataatgttaagttttctaatccatgaacatggaatggctttcaatttatttaggtcttctttaatttctttcaacaaggtttttagttttcagagcataagttttacacctcttttgttaagcacatttctaagtattttctttttttgataccattataagtagattttttttttttttgagaagcagtttcactcttattgcccagactggagtgcagtggtgcgatcttgactcactgcaacctccacctcccaggttcaagcaattctcctgcctcagccacccaggtagctgggattacaggcgtgtgctaccacgcctggctaatttttgtatttttagtagaggcagggtttcaccatgttgcccaggttggtctccgactcctcgcatcaagagatctgcctgcctcggcctcccaaaatgctgggattacatgcaagagacactgtgcccagcctgggtcccatatatttcttgctggggttatttctagatactgtgaatgggataattccattttttaaaaattgcatgctcctgctaaataggaatgcctttgatgtttaaatgtggctccttaaagcagccctcttgcctgactgtcttgactgtcttattactgctgattgcttgtttgatttttgggcagattctgaattgtgcaaattgggatggtgaatgataactttgatcttaaagggaaaaaaaggacaacttacaaacaagaaaaagatatctacaacacatataagtgacaaaataatttttagcagaggaagggcccaaggggtatagcaaagcagtgaaaattaccgcattctatcagaatctgaaaagctgggttatgaacaatcccagccttcagtatttatccaaaataaatgaaaacaacgtccataagaaaatgccacagatgctctcaatacaatagtaaaaaactaggaacagcccaggtgtccacaggagatgaataaactgtgggttatccaggcaatggaccactacacagcaagagaaagggatgggatgctgacacttacacagacgtgggtggaatctcacgtcgtgtacagtgaaacagtacatcatttatgatttcacttacataaagctctaggaaatgcaaattaatctatagtgacagcagagcaatggttgcataggtggcagagattgatttcttgaaaatgggtacaaaaagaccttcgaggggttgatggaaatgctctttattttgtaggagtttgggtgtgtgtttatcaaaactcattaaattgtatgcttaagatctatgcatttcacagcacaaaagtcaatctaatctaaataaaaatattaaaggccgggcacagcggctcataccagtcatcccagcagtttgggaggccaaggcgggtggatcacttgagctcaggagttcaagaccagcctggccaacatggcaaaaccctgtctctactagaaatacaaaagtagccaggcatgatggtgcacacctgtagtcccggctacttgggagtccgaggcacaagaatcgcctgaacctgggaggtggaggttgcagtgaactgagattgcgccactgcactccagcctgggtgaaagagcgagactctaactcaaaataaaataaaataaaaaataaaataaatgaataaaaagagttcaagactggcctagtcaacatagcaagacttcctctctctaaaaaaaacttaaaataataaaagtcatgttgacagcagtctggttcgtcttcccagcctgtccccaccagctccacgtggatttaactatttcttgcacatggcctgtgctcttccagtagggcagagcctgcatttgttgggcggtggactgtcccatttccctctgtttctacctcccatgcaactgtggcctgaagggctccagacagggaaagagaggtttcatctgcgctaggagggcagagatacgcacataccatcagctgcttccaggagagggtttcagctttaatgactgagaggtggcctcagccttggggaagaaccctcctacagcctctccggaggagcagggcctcctcactgccggggaaggctgagagtgtggtctccagtatgctgagttctcagctgcaggaggcagaatcactcatccatttccctcacccacctctgttcaatgatggtgatctttccttttctttttgaaatggagttttgctctattgcccaggctggagtgcagtggcacaatctcagcttactgcaacctctgcctcccgggttcaagcaattctcctgcctcagcctcccaagtagcttggactatgggcatgtgccactactgcctggctaatttttgtatttttagtagagacagggtttcaccatgttggccaggctggtctcaaactcctgacctcaagtgctctgcccgcctcagcctcccaaagtgctgggattacaggtgtgagccacagcgacaggccaattttttgcttttttaaagacagggtttcactcactttgtcgtccagtctggagtgtggtgattcaatcacggctcactgcggcctctaactccagggctcaagccatcctcctgccttagccttccgagtagtggagactacaggcatgagccaccatgccagggtaatttctaatttttttgtagagacagggtactgctatgttgttcaggctggtcttaaactcctgggctcaagtgatcctcccgcttgggcctcccaaagcactgggattgcagtcatcagccactgcgcctggccagtgatgggtgagttttataaatcaaaatgtaatggtgaatgtatttgtacaaactatatttacaagattctatcatttaatttaaaaggttgactggtgtggaaacagaaacatcatttcgcaccacattttatttcctacagtcaattagattatactttaatacaaaaaactaattaaaatttaatcgaactttagcaaacatgggatgtctatgaagtgtaagacaatttactacatgttctgggggctgaacaggagcgtgcttttggtttctaccagaagcggtctctccctgccgcacgtccgcccctgaaaagaatgcctaggataggcaaattcaggcaggcggggagagaagggtggtgttggaattagtgtggactgactttcagcattgttttgttcttcactgatctgtgcctctgagataatgtaacaccttcttctgaatttagagtggctcctaagaagcagttgtgatcagttatttaaaaaaataaaatgatgccaaactggacactggctgggcttactatgctgtgtatggcagatcacctggggcacgtgtgcgtatctgggattgaattgcataagcaggttgggagccttgctttaaggatgggttggaggccagctgatgctccaggagcctgtctgctcttgaattcctcagcagagcttctctggctcagtcccacaggcacacagctaagggtgactgcaggcttcggggtggacatctgggatggctgcccagcaggtgatgttcagtaaatccacacctaggagaatcaagccctggagacggccaggctgatcagattcctctgatgctggagtgcgcacctctgatttccctctttcagtgaatcccaaagctctttttttttttttttagatgaagtctcactctgtcgcccaggctggagtgcagtggcacgatctgcaatctctgcctcccaggttcaagtgattctcctgcgtcagccgccccagtagctgggattacaggcgcccaccaccacacccggctaatttttttgtatttttagtagagatggggtttcacgatgttggccaggctggtcttgaactcctgagctcaactgatccgccggccttgacttcccagagtgctgggattacaggtgtgagccaccacacccagcctacattttttaaaagagaaagtaaaaatgtaaaccatagggccaggtgtggtggctcatgcctgtaatcccagcactctgggaggccgaggcaggcagagcacttgaggtcaggagtttgagaccagcctggccaacatggtgaaaccccgtctctacccaaaatacaaaaattagccgggcatggtggtgggtgcctgtaatcccagctactcgggaggctgaggcaggagaaacacttgaacccaggaggcagaggttgcagtgagtcgagattgtgccgctgcactccagcctgggcgacagagcaagactctgtctcaaaaaaaaaaaaaaaaaaaaaaaaaggaagccatagatggggagagaaatttggaatacgtacaccgagatccctctaagggatctccggagttccaaatagtcttactcacttccagcgtgagtggtgttccaatttccccttggcaggcagggtccatcaccccagccagcccagtccctcccttctttgctcattgattcagaggcatggggagctcagagtggccaggagtcagtctcaacttccagttcggtggaatcagtgctgtgactcctggcggaatcattccttccttaggagctaagacctctaggccagcagaccatgagatgggaggaacaggaaacaaaattacctagtggctcactaagggtaatagtgaacggtgccattccttttccattccttgattcctggaccctcgaatcctggctagaagcagcagcgccatctatcggacgctaattcggagcttatgccgccttctgaacaaccttgctccaaccctgcaaggtatcgcctctgagctgatgctgtaactgcgtcttcaaaaggccattccaggccgggcgcagtggctcacgccagtatactcagcactttgggaggccgaggcaggcggatcacgaggtcaggagttcgagaccagcctgaccaacatggtgaaaccccgtctctactaaaaatacaaaaattagcaaggcgtggtggcgtgcgctcctcgggaggctgaggcatgagaatcgcttgatcccaggagacagaggttgcagtgagctgagatcgcaccattgcactccagcctgggcgacagagtgcaaaaaaaaaaaaaaaaaaaagaaaaaagaaaaaagccattccactgttctatcaagccagctgcttcagattggtggggaacatggcaacaccagtgaattccataaacatcgccgcacttcatttgtgggaaattgaattcctttttgtgtgtgtgtgacggagtctcgctctgtcactcaggctagagtgcagtggtgtgatccctcggctcactacaacctctgccttgcagattcaggcgattctcctgcctcagcctcctgagtagctgggactacaggcgtgcaccaccatgctaggctaatttttgtatttttagtagagatgggatttcaccatgttggccaggctgatctcgaactcctgacctcaagtgacctgcccaccctgacctcccaaagtgctgggattacaggtgtgagccaccgtgcccagcctactttattttctttttaaaaaatttaattcatgtttcataataatcctctccctccccacttttagagacagggtcttactctgtccctcaggctggactgcagtggtgcaatcatggctcactacagcattgaactcctgggctcaagctatcctcctacctcagcctcctgagtagctgggactacagacatgcaccactgtgcctggctatttttttttttttatagagatgggggtctcactaagttgcccaggctggtctcaaactcctgagctgaagtgatcctcctgccttggccctctaaagtgctgggactacaggcgtgagccaccatgcccagccctttccccctttgtaatgttgtttcatttggtttgggccaacataacactgttcttaaataatataaaaatgaatggatttaaatacagtgattaagttcataataaagatgggctgtctgtggtggtggaggggcccacggagctccagcaagtgggtagcactgcctgcttcctattgcatcccccagggaattccagggtgtgtgtgtgtgtgtgtgtgtgtgtgtgtgtgtgtgtgtgtgtgtgtgtgtctttctctctctctctctctcagggctggtggtcttgctaccagacacctggagcccctctgccagctgctttgagcttggctgaaagtgagcttggtctgctcctctcacctgctatgattaaggaggggccactccttgggacggaggggcttgtccatggctttcttcatccacccctccagccttgcattcccacaatctgtacttaggcctcgagactcaggctgtctcagggtgtcacctttattcctgtggctctgtagtaacctgttttgtgttgctgtaaaggaatgcctgaggctgggtcatttataaagaaaataggtttatttggctcacagttctgcagactgtacaagaagcttggcactagcatctgcttctggcaagggcctcaggaggcttccaatcaaggccagacatggtggctcatgtctgtaatcccaacactttgggaggccgaggcaagcagatcacttgaggccaggagttcgagaccagcctggctaacatagcgaaacctcatctctactaaaaaatacaaaaattagctgggcgtggtggcaggtgcctgtagtttcagctactttggaggctgaggcgggagaattgcttgaacctgggaggtggaggttgcagtgagccaagattgcaccactgccctccagcctgagcgacagagtgagactgggtctcaaaaaaaaaaaaaaaaaaaatccaatgaaggcggaaggcaaagggggagccagtgccatgtggcaagagaggaaggaagtgggaggaagtgccaggctgttttaagcaatcagctctcactcattcattactgtgtggggggcaccaaggcattcgtgaggaatccaccccaagacccagacacctcccacgaggccccacctccaacactggagggccacatttcgatatgaggtttgaaagcgacaaatatccaaaccatatcaggcaccaacagggttaaataacaaaccttacctgttagcccatcttggggtttctgatgtgcttggcttcattaataatttagtgaggtggacgagattggactgactcttcccccaaatcaatacacaaatgattattgcttgagggtacttctgagtgcttcagcaagaccgagggagctttttggttgaaaatgggaactgcactcagcactggaagttcctgcagagaaggttatgtaaaccaaggggcgacctgctgctaacattttcattgcaataaaacactttttttttggaatggtgcttttatgacatacttactatcaccgtttcaggcctataattttaaaattactgcacaatattgaaggtgaaatgattttactgccgctggtctattaaggttctaggaactggctgcagcttggagagtgtctatggctggatgcacttggacacaccgtgccgactgccctggacgtgcctgcagacacagcaggctggatgggtgcactgtggctgggtgtgtctgggcactcccacaggcgagcaggcattcagctctgagctttgcagttcccacctggactgaccaaactctaccagccctcctgccccctgcccccccgccactgccccgggattgcagaaatgctaggaagctgcactgaagtcaaagcagcaaccccggccagctgtcccaccccactgaactcaggaggaaatgctgtgattgctaccatatatgttgccagtttatttgtagtattttaaatttatttttatttttattatttatttatttatttatttattgagacggagtcttgctctgtcgccaggctggagtgcagtggcgcgatctggactcactgtaacctccacctcccgggttcaagtgattctcctgcctcagcctcccgcgtagctgggactacaggcgcgcgccaccaggcctggctcattttatgtagttttagtagagatggggtttcaccatgttggtcaggatggtctcaaactccagaccttgtgatccgcccgcttgggcctcccaaagtgctgggattacaggcgtgagccaccgcgcctggccttaaatttatttttattattattattatcattttttttttttttgagagagagagtcttgctctgttgccaggctggaatgcagtggcacgatctcggctcactgcaacctctgcctcccaggttcaagtgattctcctgccttagcctcctgagtagctgggattacaggcctgtgcctccagacccagctaatttttgtatttttagtagagatggggtttcgccatgatgaccaggctggtctcgaactcctggcctgaagtggtctgcccaccttggcctcccaaagtgctaggattacaggcacgagccacttcttctggccttgtatttttgtttgattttgttttgtttgtttgtttgttttttatggtaaaagacacatggaatttactattttaaccctttgtagctgtacagtttagtggcattaaatacattcacattgttgtacaaccatccacatatccatctcaagaacttttaattttcccaaactgaaactccttacccattaaataactctctatttgcccctcctctcagcccctggcaaccatcattctgtttattgtccgtatgaatttgactatgcaagatgcccctgtaagcggaatcagacaatatttgtccttttgtgactggcttatttctcttagcataatgtcctcaagtttcatccatgtcatagtatgtgtcagaatttccttctgttaagactgaataggtggctcacacctgtaatcccagcactttgggaggccgaggcaggtggatcacctgaggacaggagtttgagaacagcctggccaatgtggcgaaacactgtctctactaaaaatacaaaaattagccaggtgtggtggcccgtgccggtaatcccagctactcaggaggctgaggcaggagaatcgcttgaacctgggaggtggaggttgcagtgagctgagattgcacaactgcactccagcctgggcgacagagggagattctgtctaaaaaaagaaacccaaaaaaacaaagaaacaaaaaacggaataatattccactgtatggatggaccacattttgcttattcattcatcatccatcaaggaacacttggttactcccaccttgtggtcattgtgaatgatgacgcaatgaacatgggtgtacaaggatctgtctgagtccctgctttcaattcttctgggtatataccctgaagtggaatggctggattacatggtaattccatttttaattttttaaggaacccgtatactggtttccacagtagccgcaccattttacactcccaccagcaatgcacaaaaatgtcaatttctccacatccttgccaacatgtgttgttttctgtgtattccacccctgccccccaccgtagccatcctaatggaggcaaagtggtatctctctgtgattttgatatttttaattcaaataaaccttagcacctgtattagtccgttttcacactgctgttaaagacatacccgagactgggtaatttataaaggaaagaggtttaatggactcacagttgcatacggctggggagtcctcacagtcatggtggaagatgaaggaaaagcaaagagacttcctacatgtcagcaggcaagagaggacttgtgcaggggaactcctctttataagaccatcacatctcatcagattcattcactatcacaagaacagcatgggaaagacccacccgcatcatccaattacctcccaccaggtccctcccacaacacttgggaattgtgggagttacagttcaagatgagatttggatgggaacacagccaaaccatatcaacaccctttctcaaaagctccattttttctcttcttttctttcttgtcctttcaccatcttactccaaagttggacattaacttctgttcagaaatcccacagtcacaggccctcatgttaatttctacccaaatggctgagcttttcaaatgtcattggagaaacatggattttaatgtatacgatggccgggtgcggtggctcactcctgtaatcccagcacattgggaggccaaggcgggtggatcatttgaggtcaggagttcaagaccagcctggtcaacatggtgaaacctcgtctctactaaaaatacaaaaattagctgggcatggtggtgcatgcctgtaatcccagctactcagcaggctgaggcaggagaatcatttgaacccaggaggcagaagttgcagtgagccaagatcacgccattgcactccagcctgggtgacagaatgagactctgtctcaaacaaacaaacaataataaaaaaatgtatacgagagcaaaatagccatttagaagacatcatcctgtgaggcacctctgctagggttccgggagggatcaaggctacaacaaaccatgatcacaccactgcgcaaagcatttcaggacagtttctgcccaaggagagactgggcagacagaccttcctctttcactgctggccccaggtgcttgcagttctctccaagggggccctggagacctgggggtccatcagtatgtccatgtgctggagcggctgctggcaggatcaagaacttccctccaaacgctctctggcttgactattcgcctgatggaacaggcagaaggatagaaattagctctggggggagcggaaacattctgaggccagagcaagctggtgatgagtggggcttggagaaggtggcaggcagggctgttcacaggatcatgcagcttgagctaaaaactttgaagtctgttctggagcattttcagcagtggggatgaaccaatttgcatgttaaaaacgtgagcaatgaattgagaggcaagggaccacatggagggaggcctctgtggaggtccaggagacaggagatggtggctgggaccagggaggtggtcacggtgatggagaaaggtgggtagatttgagatacatcatggggaccagcaggttgtagtgatggattggatgtagggagattggagtaaaaatgatcaactcagtaatggacgtggccatgaactgagtagggcacagtagagaaggggcagatgtgggggtgaggggtgtctggtctatggctcagctagaataatgagaggtttgccctcttggaagtcacctgtgataaacttgggcataaaggtgatcataaaacaatttttttcagttttatttgccaaagccacttttggcctttgaccttcaaatagattgtaggatttttgttgttgttgtttttgagacagaatctcactctgttgcccaggctggagtgcagtgtgcgatcatggctcatcgcagcctcaaactcctgggctcaagcaatcctcccacctcagcttcctgagtagctcagactacagatgcataccaccacacccagcacattaaaatttttttttttgtagagccagggtcttgctgtgttgcccaggctggtctcgaatcctggcctcaagtgatctgcccacctcggcctcccaaagtgctgggattacaagtgtaagccactgtgcctggctggttctagttatttgaaatcaggaaagacactgaccattcaacacagagtcctcttcattagtgtctggtaagcaactggataagagagcgcttgagtttgcatctgcctgtgggtgaatgttgggggaggatgtgggactctcctgtgtcattggtttcttctgtgtcccacgagggctcggggtatgtggctgatgagtgggcaatggtggtggccctctcgtatgggatggagtggggacttacatgggatgcctctgtgtcccttccgtctcctctctgcatgtcctgtggctcctcactcctgcagcagattcctgaaggcgtcactggcccacagtgactgtgacagcagctttgcttcctcctaactgggaaggccagcttcttgccaggaagcccctgctctcatgtctgagccctctgccccaccactgctccctcacctgccccagccagtcagttcccatattctgggtccatgcccaccatctccttcccagtactgaattctccaatggttagaagcttttgggttgtgatgaatagacacgttctggatatagcttgagtcaatgagggaggtttacgaaaaggtttcagaggtggagagacccaggcgattgcagctagcgtggaagagtgttgaagcagagacaggaataccaggaacctttccagatgtggtgagagggcggtgggggagaggactgggccagagctgcattggggacccccagcaagggtcttgcctggcacagcaacctctagggggcactagaccatcatgagacaaacgggaaatggggtgtcagttatgggccggggtctcaatatgggccgggagtaggatagggcagtgaggcactcaccttgggcacagaattgaaggaagtgccaaaaaactcaataatgaagataaatcaactttaatgcaaattttttgtgtgtgtgcaatggggacagttgtttccaatcagcccaaggttcctgggtaccttggccgtttcttgccttatgggtttatgagggttcacaatgggatgtgcatagattggggagcatggagatttagatatagtcatgtgattgtagagcttttcttagcctttccacttggttcaaaatatgggaggatattttgataagtgtgtctaggggctcacatttttcttttgcttcaggctccaacatgattcccatattggtcattggtctggaccctagattccttacataacgtgcaaaacatgcattgaagcaggcagcatcttcaacaaaaccgcatattttggccaggtgtggtgggtcctgtctgtaactccagcactttgggaggctgaggcaagaggatcccttgagtccaggagtttgaggttgcagtgagccgtgatcacaccactgcactccagcctgggcaacagagcaagaccttgtctctacaaaaaaatgaaaaaattagcctgacatggtggtgcacacctgtcatcccacctacttgggaggctgaggtgggaggattgcttgagcccaggagtttgagggtacagtgagctatggttgcagctctgcactctagcctgggtgaaaaagtgagactgtctctaaaaaaactaagaagcagcagcagcagcagcaacaacaacaacaacaacaacaaacgaacaaaccgcagatccaccctaccattgcccctgcctctgttgagcatttttgccatgcgtaaataaatgcctgctcatccgcagtcagcagtctgaggaaattctgaaaccaaattacacataggctagtgctctatgccatcaatctgtaatgtatcttgttatttgatttttacgtcctttaatacatttcctaagaagtctgctttggaaaaatcaccaaaggaattagaagagagagaataagaaaacccagaaaaactaaaaggatttttcttccccccattttttattaaaatccaatcaacctgcacagtgcgagtgagtgagtgactgtctacgctttcactaacggaccatcagtttctctcaaccttctctccataaacggagaatatcaaatgagggtctgggggtgttagaaaagggttgggagcctcagctcaggttggtgggcccgctgtgccatggagcctttggggacctctgatttcacatccgtcttggccctaaatggccttctcaaaccttccccctgtctctcctggttcttgcctcattggactcaacctcttggtgggcagctctccagagggcacccccagcctaagaagcaggcctcctcccaagtccccagcctcacgaggatagtgggtaacagggtgggctcagggggccctgggagatctccagaggcctctggtgtgttcaccaatgtcccctgacaggtcttgcttggcacagggggttcctcttagagacgtgacagggcacttggactgtggcaaatgaaagaagcggaggggcaggaacagggacaccttgcgaagaagacaggccttagccttgtgccacccctatgaggtccctaagccgtcctctctctcccaccttttcccagtcctcgctccccggtcctcctcagcacagccggctccaggagggatcaattcgtgggcccgggaggaggccaggcgagcaccggctgcctggagcactgggctggagcgcggggagcgcggcggggggcgcgggcggggcggggctggtgcgcagagctgtccagcaccccgaggcggggcgtgcgcccccggcccgccccagccgcctccgcccgcccagccagcgccactgcggctcggcgggcgcgtcacgtggctggcgcagcgcggcctccaggctccgggcgcgggcgaggggccgggcgggaggactgacagacccacggacgctctaccggcggcacccggccgggcgggctgggcgcagcgcggggcggcccggggacgccggggccgggcgggctgcgcgccgcggggcatgggcgcgccgggggtccccgggcccaggccggccgcggcggggctcccggggcgcgggggcagcggcgggcgggggtcttccctggcggccgccgctgagcccccgcagggcccgtgacgccgcggccgatgtggccgcgcgcgccctacgggcctgcaccgccaccgcacaaagacgcctcgggagccgccgcctgcacccgggccgcagcagccacgccagccggagcccgagccctagcccgagcccgagcccgagccgcagccagagccagagccggagccgcagccggaaccggagccggagccgcggggcaggaggcggcgcccgcgggcggccgggcccggcatggagaagcgcgcggccgcggggctggagggcgcgccgggcgcccgggcgcagctggccgtcgtctgtctgggtgagtgggccgcgcgggccgggcaggtccgggtcccccgcatggcagtccgcgccgcgccctgaccgacctcctctccggccgcggcatcccgagccccccaccgcggtggctcccgcgcggagacccagagaggggccagcaccgcttgcccgcctggccccgggcctgggagggcgactctggtggcgcagccccggctcccgccccgctcggagtagcgcccggagcccgggctgagcgctggcaggaggcccttcgtgcaggcggcagccttcaacccggcccgcccgcgctgagcctggagacgagggggccccgggagctggggacaaaggccaggccggctgtcccctgaagaagaaactgtttccggcccggagttggggtgggggctggtgtaagccgcagatggggactcggggtgcggggcagggctggaggagggtgccagtgtggaggcggcttccaggggactcctgttttccctttgtgtctctcagcccccaggcaggcctgttcagtttaggagggtgcttgggttgggccagggaccggtcaaggccaggcatggggtgggaggggctcccgccctgtccgggagtttttctgtccagctttccagcgctctgtgtaggcgagaggaggagttaaatccccaacccacatggctcctttatttactgtgatgaaggagggaggccattataagaactgggggtcattaggggacaccctgtgatgtcaccagtgagggctctgtaacctgacaggtttgctgaagccactgaaatgacaaagtaatcacccccaggcctcagggagctccgaggctctggcaggcccttgccccagctgtgtgagcctggctcagtgggaatgtgccattggggagcattgagggtgtaaccccagcgcgcccaccccaacctcagtgcggggtcatgtgtgctgggctctgagctgctgggtgctggcatccctggtgagcagagcagggggacaggcgctccatgcttaggagctttggcctggctctgtccagggggcctgggtgtcctgggtgggggcagcggttcctgcttcctggccaggcgggatctgacacacatcctgaaccccgggaagttgggtttccccccaccccccgactctgggcccgtaaccccccgggccagagcagaaggtgaaagtaagggccaaaccccacggaggtgggtgcttgaggggtggctggggagttctgctttcctcctcaaagtcagcttggcacgggggaagaggatggttccgtcactagctgcgtgccctgtaaatggggattatcagaactgcctcccctcctgcctctgctgctgctgggcgagcaaagccccttggtagggggaagcccttcaaagttgtaggagcaggccagggtgcggtggcaggtgcctgtaatcccagcactttgggagaccaaggcaagagaattgctggaggccaggagtttaagaccagcctgagcaacacagtgagacctcatctctacaaaaataaaaaataaaaaaataaccaggcatagtggtgcacacctgtagttccagctacttgggaggctcaggtgggaggattgcttgagctcgggagtttgaagctgcagtgagctatgcactccagcctggataacagaacatggaggcagggaggtgggggtgaggtggtagggaccctcttgatgggcagtcttgggctgcgctctgggccttgccctgtaagaggaaggggaccagcgggccagccttgggtttagctgtggtgtccctcatgggctgctgctggtccccagcaggtatgtgggacccctgaccctttctttgtatctcccacagtgaacatctttctcaccgggagactcagcagtgcggttcctgccttaggtaagtaagcactttctctccttcctccactccttcagtcccttttgggtgagtggtccctgaagacaggccttcagggtcctggcactaccccgagttcctgtgtgcatcttttctacatcacaaaggagctgtttggctttggacaggcttcaacttgtctgagcctcagtttcctcatctgtaaagtgggtgaaataacaaggtctactcaaaacctgtctcttagtattccatgagccagtgaggcaagctcttagtgtggtgcctggcacgtggtggctttataccaccggcaagctgccgagggtcccgtggaattgacatcttgtgcctcattgcaggccatgagcttcctaggatttaatttataggagtatgactgaggggtgacacagagaggcccatgccagggaaagaaggctttattaattttcttgaaaggaggggacatgccacgccatgcagggccacctgggaattactagatttggacaagcaggagcaggggtggaagaaaggtgtaagttagaagctgcatcacagcttccgtgggaaagtctcgacatccaggtgctgtggctcacgcctgtgatcccagcatttgggaggctgaggcaagagaatgcttgagccctggagtttgagaccagcctgagcaacatagtgaaactccatctctacaaaaaaaatctgaaaattagctgggcacggtggcatgtgcctgtagtcttagctactcgggagactgaggcaggatgattgcttgagcccaggagtttgagattgtagtgggctatgacggctccaccgtgctccagcctgggtgacagagcgagaccctgtctgtaaaaccaaaaccaaaacctgaggtcaaggtgcagcccgggagaacaatgggggcctctgacttgttcgttgcctgctgctctgctcggtggggcaggaggtgcctgggtttctagttctgtgcagggcccggcttgctggagaaaggacccggagctgtcaggcagcgggacccctgctgtggtcaaaggggaggcccagggtgcacagaagctgtgctcactggctcctctggcaggcttgggcctctttccctctctctctgccctgagctgtgctctcaggagcccggcctcctctgatgcttcgggctggctcaaggccgggccttgctcagcgctgacctagccccagccctgtctgctgtcctggtccacacaactgatggaggcccagtctcccatcccaatttccaggaaaaggctgactggcccagcctgggtcagatgtctgtggccatggtagagtcaggggaagggggaatgagggtgtcacagcttatgaatgtgagccccaggacaccctcctgctggtgggtgtgtcaccccaaatgtgtatatactccactttcagaaaagtgcttccctggggactagggccagtcatggagcttgggcgaggaggacactgtccaggtccttgcgtttggttgtccttagctgtcaagacctcaggccccagcagggtccacgttgccaaactccaacggctgctgttcacccctggtgccctctgtgatgggagctgcacgcccagcgcgcaaggccatgggtggtgatctgggaccctagctgtcctagagtccacttctgacacctccagcattactgaccacctgcaggtggcccaaggtacccacctcccaccacagctccatgactctgcatttccagagctttccctgggattcctgctgtgtgggaccctggattgggaaacattcccccagccccttctccaccctaactaggctcagttgctccagagggtctagcagggctacctggggacctcacaggtttttacccctcagcaaaccccatcctaagcccaggtatgttgggccctgactggtcagaacacctcctgcatccccccagcctctgggctcagccctgaagctactgtggctccaacggggagggcctgggcaggggcttcatgcagtttgcaggcagctggcagcttccccggcacgtctggggtgggactcccagctccccgtcgtcggattacaccaggcaggttggcgggggtattgatcaactttggaaattggatctgcaaattgtgctttctcaggccttgcagtgtcctctcaggaatatttgatgactctttggaccaggaaaggacactggcccgaaagtacctggtcattccttccctacttgtgtgggccaccatggctccgagggcccaggccatcttctgcctgagagaagtcaggtcacctccagctgaagctcagacagacctcttgacagcccccaacacctccgaacccctccctcttccccattatcccgcaaatcatgcagtcctcccatctgccctcactgcctgcccgctgctacacagcctgtcatgaacctcacctccatggagcattcctggagatccccctcctcattggcaacccctgaccctgtgccctaccacatgcacgtctgcctcaggtcaagcagggttcttgcctaggctgggcatggtggggcacacctgtagtctcagcactttgggaggctgaggtgggaggatcacttgagcctggaagttaaggctgcagtgagctgtgatcgcaccactgcactccagcctgggagacagagcaagatcttgtctcagaaaaaaaaaaaaaaaaaggagtccctgcctagaacttgcagctccctgcacagagcccagcctccctcctgcctcccatcccctctgcatgaggctgggctgctgctgcacccaccatggtctctgccaacccgctttggagaagagcaaacagtttaaccaagtttccctgatgtggaaatttccggggggcccccaggggtgaggctgtttggaggcacccgttgtcagggttttgctgagaggcagggcagctggcagttgtcccttcctctgctcctgatgtggctggtggcctcccaacccctgatgaaggggtcagacataggtctatgagggagaagggttctggctgaagtgagtgggaagagagaaaggtggcaggtgacacctggcttttcccagaaagcgtgggtgagacacctggcccccaagggccccaaggagaggggcaggtctatgtctgtcccctaggggaggcctctggggctgagtaggaatggacagcgccttgccctgcccctggccttgtcctccaggacaggggacctcacaggtttttacccctcagcaaaaaggtgaacatgggaggttcccagccacgctgactcagaggctgacacttcagcttagcatgcgctttagagatgcaatgtgggggaccataccacttcagcctcactgggccttcccttctgtggaacctcctgttcggccccctccaatgggaaagatctcttcttttggatttccttcttttttttaattttttttggagaaaaagtcttgctgtgtcacccaggctggagtgcagtggtgtgatcttggttcaccacaacatccgcctcctgggttcaagcgattctcctgcctcggcctcctgagtagctgggatcacagacgcccagtaccacgcctggctaattttatacttttagtagagacagggttttgccatgttggtcaggctgatctcaaactcctgacctcaaattatccccccgccttggcctcccaaagtgctgagactgcaggtgtgagccactgcacccggtctcttttggatttcttcaccctacacctcccaaggaatcccagttcaggacctcagggctctgtgaggtcctcatggccagtagcctcacccggcaaagggaaccaggctggggccggggccactttgcatgtttgggtggctgcaccctgagactcctttctgatagtttatctcctgcccttcctggctgggagcagggtgtacagtgccctatttctggggcaggatcagaggctcattgtgggggctgcctcccagggccatgcatgagttccaggtggagaggtgctggcttgcacctcactgacctgggactgtcaagggtctgatggtgacgcagtggtggccagccttgctttaggaccaagagttctgttcttatccttgatgctctcacgagctgtccgtgggggttactggctccctatttgtcacagtcccgactcacctgggccttcatggtcctagtaggcccccaggggaaggggcttcagctctcagctcatggctccagctgcccagcaggtcctcagatggacccgtccactcagggacccacatctctggagcacctgccatgcattaggcactgtgcagggccctgggacatggcacggccctacctgcctgtgtgatgttcatccatcagtcccaacaacaaaagggaaatgctctgtggccgaggctggggggagggatggagggttggagctctgtgggggctatcccggagggcttccctgggaagggaccttggagctaggggtggaagctgaggagtccgtgaatgggataagaaggtggggatagcacccactagggaccaccagggcctccagggcaaagtcccctccaatgtgagagatcggagaggtccggggggctaggggttatgggagggatgaggcagagtgtggggcagggagggggctggcgctgctgtagtgaattgtggttttgtcctaagagcatgggaggcagccagagggctctccttcctttcctgcagctgggtgccagagagtcttgctgagaaccagagagaacttggcttgcaaggtcacggtgccaggggccagccatgggagagtgaggagagagtgtcactgggctcgggaaaggggtcgtccctcacctcagtttttccatctgcaaaatgggccctgccttcatctcaggctgttgtgagaatcagatggaccagcgtggggaagggtcagggtgctgtggggtgggaggtgtggtcaagtgcaggggccagccgcctggtcctgggagggtcagggcacagcggggcagggcaggctcaccacactgccctggatggtttagaagcagagagcatggagaatggatggattaaagcgaggcccatggggctgggcatggagggctcctcctttgagctggcgggcgtgatgctttgctcaacctgagcggtatacagttggcactccatgagtgcatgctggctcagtgctgcagcaagaagctgaggcccccagaggcctacagtgattcctgactctgcccctccctaactgtgtggccccaggcaagtcgctgaccctctctgagcctgtttcctcacctggttccgagatctacctttggcggctttgcacttgtactcaggataaaactcaaattctgcacaaggtgtgatcagatccaggtggcgtttccagccacagctggactttgccacctctcttcaggcctgttgtagtatcttcattccactgaggggttctgcgtaaagttcgtctgctcccacccccagcctatgagttccatagagcaggccttattcccaccttactcagtgtgcctaccatgcatgcttggcatgtagtaggtgctcagtaaatacttgttgagtgagcaaagcctcagggaaggcaggcagggggccatcgcaggatgggctatgccggctgggcaggcctaggggtgtgggattctccactgacccgaggccacgaggctacaccttggaggtgccggctggcaggacgggttgttggtgggttttctcccagctctgccagagatgcgggggacaggacctaggctgtagtccactgcatagggttgggggctacagctgcctcaagtctagggggccctccttggcctcccgtacacaccacctccatgaagtcacaagttgtggccttgcccttggccatggccacccttggctggactcgatcccaccatgggggaggcctgtgctgaagcccccttccccccactgcaacccgcatcccaaccaaagatgggccggcctttctcggcctcctctcccgacagcggcctgcagtgggaagctggagcagcacacggagcggcgtggggtcatctacagcccggcctggcccctcaactacccgccaggcaccaactgcagctggtacatccagggcgaccgtggtgacatgattaccatcaggtaggggcacccgggggtgtcggaaggaatcaatgtgggcccacgtgcatggggtgggtgagaatgtgtgtgtgtgagcaggtgtggagggcacacgcctgagggtgtacatgtgtgtgagcaggtgtgggatcatgtgcatgtgtgtgagcatatgagtgaggcgtgtgtgagcactcgtgtgaacaggtgtatgggtgtgtgcatgtgtgtgagcatttgtgagtaggtgtgtgtgcatgcagatgtgtgtgtgtgaggtaggcgtgtgtaggtatttgagcaggtatgtggtgtgtgcatgcatgtgaacacatgtaagtaggtgtgtgtgcatatgtgtgtgtgtgcatgtatgtgaacacatgtgtgcttgtgtacatggaaaagcccatgtcggagaagacataaaggacacatgtgagagactgcatgtgtgagcacatgtatgtgcacgagccatgcctgcaaaggtgcagagagcgtgtatgtgcgcatgcatgtaagataacaggtgtaaccatgtgtgaaccgtaagcatgtatgtgcacatgtgaatgcatgcacgcaagtgtgtccagtgctctgggtctccacgggcctctgtggcgaggtgcccaagctggacctcttcctggtttgagcctcgttcatggggtgtggggggtctcagtcactcagctctgccaggaaggcagggccagcacacaggccactgggaacacagcctgggactggtgggcatggtctgatgtctctgaggtggcagaggtgtcctctctgtcctgcaggggtggctgggggccaggctggcactgagcccagagcatggtttctggagggggccttggggaggggagtgaatcaggcaaagcccgggtgcttgagctgcagggacatgcagagggaaagggggccaggcagtgagcggtggtcctggccaggggtggtcacagggacatttggctggggagtcactataggttccatctgccatagttttcctaaatgccagagcccaaaaagcgcaacccctgacttactccatagctgcaatgcgtgaggatgtgatgggcatgggcagggtctatcctagtctctgtgcctcagtttccccaagggccaggtggttcagggccagtgtatctccggagatgacaagctgtcaacctgctgcagccttagccagccccgtgggcagtctcaccctcacttcccatgcctgggactttgtgctgggcccatcccagtggtcccgaggtggagggttctgggcccttgggccactgcccttttggggagggtgtcggggcagggggctcttgacttcctgctccacttcggcttcgggctgggggtactgtgtgcactgatggagggaaggggagccgcagcagagctggaaatgacctgcgtggatgtcgcaattcttcatggagcctcccgtgcacacctggatggggacagtgtggggacagagtggctgggagtggaggaaccaggcagtctggaacatgaggagtgggggcagccggccgggacagggctggctgtcctggccgtggctccagcctgaccactccctgctggtcctcggccatggagatcccacctactgcctcatgtctgggtcctctccgcccccccgcagcttccgcaactttgacgtggaggagtcccaccagtgctccctggactggctcctgctgggcccagcagccccaccccgccaggaggccttccgcctctgtggctccgccatcccacctgccttcatctctgcccgcgaccatgtctggattttcttccactcagacgcctccagctccggccaggcccagggcttccgtctgtcttacatccgaggtgatggaggctgcagggcaggcaggacaccacggagcacaccgtgcatgcccacaggctcccggcccacaggggcggcaccctccacagggccccggctccctgtgggatgtcccctgaccgccctgtcaatctcaggacagtggcaggactgggcatgcggatgccttggacctctcaaggtcactggccccacttcccagtcttggctagtcctgggaactcacccctaaccccaggctcaggtcagggacagagcccaccctggtgttggaggggtctctgctgccacagtgatggggaaccacctgcccgcttttggccccaggccccctggccgaagggaggctcttctgtctcctgactgtcccctgctacgtctccaccccacagggaagctgggccaggcatcctgccaggcagatgagttccgctgtgacaacggcaagtgcctgcccggcccgtggcagtgcaacacggtggacgagtgtggagacggctctgatgagggcaactgctcggcgcccgcctccgagcctccaggcagcctgtgccccggggggaccttcccatgcagcggggcgcgctccacgcgctgcctgcctgtggagcggcgctgtgacggcttgcaggactgcggcgacggctcggatgaggcgggctgccccgacctggcgtgcggccggcggctgggcagcttctacggctcctttgcctccccagacctgttcggcgccgctcgcgggccctcagaccttcactgcacgtggctggtggacacacaggactcccggcgggtgctgctgcagctggaactgcggctgggctatgacgactacgtgcaggtatacgagggcctgggcgagcgcggggaccgcctgctgcagacgctgtcctaccgcagcaaccaccggcccgtgagcctggaggccgcccagggccgcctcactgtggcctaccacgcgcgcgcccgcagcgccggccacggcttcaatgccacctaccaggtgaagggctattgcctcccctgggagcagccgtgcgggagcagtagtgacagtgacgggggcagcctgggcgaccagggctgcttctcagagccacagcgctgtgatggctggtggcattgtgccagcggccgagacgagcagggctgccctgcctgcccgcccgaccagtacccctgcgagggtggcagtggtctgtgctacacgcctgccgaccgctgcaacaaccagaaaagctgtcccgacggcgccgacgagaagaactgcttctcctgccagcccggcaccttccactgcggtaccaacctgtgcatcttcgagacgtggcgctgtgacggccaggaagactgccaggacggcagcgatgagcatgggtgcctggccgccgtgccccgcaaggtcatcacggcggcgctcattggcagcctggtgtgtggcctgctgctggtcatcgcgctgggctgcgccttcaagctctactcactgcgcacgcaggaatacaggtgggcgctgtgcccgcagccaggggaccgggcttcttcatcacccaggcttgctgtccccgtagctgtgggtttgcaaacgggggcctggactagctacatggaggctgccctggtgcacactggggtccctatatcttggggtgtctgggtggagggtcgtcctggaatcctgttgttgttcctgctgcaggtcccgggcagcccagtcatgtcgccctccgcccactgcttctagggccttcgagacccagatgacgcgcctggaggctgagttcgtgcggcgggaggcacccccatcctatggtcagctcatcgcccagggcctcattccacccgtggaggactttcctgtctacagtgcgtcccaggtgagcccccggagggcgtgaggcccctccggggccacttgggacagtgtgcggaggaggctggtccaggggtcacaggagcaggaggcaaggcctgcgcagggtgacctgagggcccatggccaggtggggggggtggacaaggtggtctctcgggtctcaggtcccttgggggtgtgctgtctcctgcccctgagcagcctgtctgccccctcagccgcatccccccgcccctaccctgctccaccccacaggcctctgtgctgcagaatcttcgcacagccatgcggagacagatgcgtcggcacgcctcccgccgggggccctcccgccgccgcctcggccgcctctggaaccggctctttcaccggccgcgggcgccccgaggccagatcccactgctgaccgcagcacgcccctcacagaccgtgctgggcgatggcttcctccagcctgctccaggggctgcccccgaccccccagcaccgctcatggacacaggcagcaccagggcggccggagacaggccccccagtgcccccggccgtgcaccggaggtgggaccttcagggccacccttgccctcgggcctgcgagacccagagtgcaggcccgtggacaaggacagaaaggtctgcagggagccactggtagacggcccagctcctgcagatgcacctcgggagccctgctcagcccaggacccgcacccccaggtctccactgccagcagcaccctgggcccccactcgccagagccactgggggtctgcaggaaccccccgcccccctgctccccaatgctggaggccagcgatgatgaggccctgttggtctgttgaccgctgggctcgctggtgaccgccacagccccgctttgtaaccagggaatacacagtcatttctaccctgcctctgcgtcctttcttatggagaggccctccggggaccccagcggaggggctggcccctaagccagctggctgcactggtgggcgggagctgtgggactgaacggcgggggggagaagagtggagtggtgagcccgtctgcagggtcccattgtacacaagcaccctggggtctcacttctctccccccactccattctgggaacccatttccagagaagcaggggaccagagcctttttgcttcatctgccctgcagtggcaacagctgcccctagagctgggagttgtcatgaggatggggccgggccatggggacgctgggtctcatccgtggtgactattttgctcacgcctcaccctcttcctgtccagcaaggcctctggaggacctgggttgggtggctcctgccaaaccctcatgcccctggccaggcaggcgccctttgccctccctgaaggtccaatctcctgggcaccgtggaagggctggggtgtgtgcctgctgtacatgaagcccctggagttccctgcaggcctcaaagcccccaggacatgctgctctgtgctttctggggacagagaggccgaggcaccaacagcagtggccacgtctgttccatcctatctcagggcctcggtttccccacctgtaagccagggtgagactgtgggctctgaagtcctgaccttcactctgtggtgatttacgggaagaaagacaatcccagcctggagcccctgagctctcctgggtggccgagctcagactggcatcgaggggcctggggtaggggcggactgagctgctaccccatcctcgacatccctttagggcagggggactctgggtgccatggtagggagcgcctgtgtcaagcagcaaagccccctaatgtcaagagcctcctccagggcctgccacggcatcttcctggccagcaacatgtgtgcacccaccgaggtacgccccagccactcccatctgtgcccatcagggactccccatagcacgagcgaacagccagccctgtttatttataggccttttcaggaagagctagcagggcagtgctaagacaggaaacccagtccacattttagggcttccttaaacaggcttctgagagtcgtatcttttttcttttttttccagaaaaaaacaaaacaaaacttttttgccaaaacacctcctcaataaacaacatgtaaacagaaacaactgcttcagtctctacaaaaatctcattgtggcttcgagggcttgtctgtggcaggcagcagggagggtgggcaggggccattctcctcctcttcgggggcgtcctgggggtagaccacgaaacacagctcctggccccagtgtgtcatggactctgaggacagacagatggaccttggggcctgacctctcgggataggggtgacccccagctccggacacctccccttgggcaggggtcttcagggagttgctccgtcggtacccgtggttctggaaactttgggtacatcttgggaagagacatttggtggcggctgggccctgtgttcccacctcagctgctaggacaccctgctctggggtgagcctctaagagggaggtctggtctccaggccccggccccctgtgctgggtgacctgcagctgcccggctcacctgtgagtctgtgcacacactttggtttgcttctccagaacactcccagaaagaaaatgggcacccccgtaaggatgatgatgacgccgaccccacagaccataggctctgagatgaagctgaagaccagcaggaaggcccagaagaccaagtacgccacggggatgagaaggttcacctggggaagggggagcagaaacaccgatggtgcagggcctccagctgtctgtacccccgacccctgggggtctggggaattttcctcccttccctgggagctgaggcctgaagggcaattgcacccactacaccccctcttggcgacagcccagtgtgttggaggccaattcatgggtcaggccgttggccagttttgctgaggatttttcaaagtctcagcggcaccgagctccacacagcggttgcgtgtggacttgaggcttgcacttggctggaggtcagtgattttttggtgtttcacatttcaggcactgagcacttctccacttaaggatttatacacacatggggggctttgcttttagctcaggctatggtcttctgtttttgtgtgggctcatgaaatcctggcagcctttgtgaccttgaacagttcctgagtctcattttctttaatttttttttttttttgagacagggtctccctctgtcacccaggttggagtacggtggccctagcaccgctcactgcagcctcaacctcccgggctcaagcgatcctcccatttcagcctctcaagtagctgggaccacaggtgcgcaccaccacaccaggctaacccttttatttttaactttttgcagagaggaagtctcgttatgttgcccaggctggtctcaaactcctgggctccagcaatcctcccacctcggcctcccaaagtgctggaataggcatgagcccctgtgcccagtcctgagcctcattttcgccatctgtacactgggagcattcaaagctctgtcctcatggggctgctatgaggaatggctgcctcagtgcacagagagccctgagcagggcccaacactccacaaaagctggcacctcccatcccacctgcccctggtgcccactgtggatgcaggggtggctctggcagcacccggcacagggccagctgtcccagggcctcaccttgatgggcctgtggagtgcaggccgcctccagcgcagcagcagcaggcccaggatggtgacgccgtagcagaggtagttgatgaaggacacatagttgatgagcgtgtacgtgtcgcccacgagcatgatgacggctgtggccccgcactgggagaggacctggggctgacggctggcccctagcctgcctcctgacgcccctgcaggatgagccctggccccacccccaacccccaccctggaatggctcacccctgccattacccggaaggtcctgcattgccgggtagccctgcctccacgccctgcctggcccaggtcccccaacttacacagacgaggagggcggggatgggggtgcagtgtctgacgtggatcatggccagcaggctgggcaggtgcccctcgcgggctccagagaagcacagcctagcgttggggacagatatgggcactggccacatcctgggtctcagctttggacctgatgtccctcttaagctgtcgcctctgacctcctgctccgggcccagcagccccactggacagttctccccctcatccagcctgcctgcctcttgctttctttgcctcccagttgtgatcagacacttgttaccgtgtgggatcatcatcccagcttcaggcagacccctcccccggcaggtgtcccttcctctggcccacggcatgactggtgcacacctgcaccccagccttccctccccatgcccacgtctccccagtgcagtcacctggagtaggtgaacaggtaaccattgatccctccgaaggttgacagagccacggagacaggcatgacccaagaaaagtagcccagcagcttctccccgaaggtctgggtgggcacagtagagaggccatgtgtaaggccggggcaggggcctgggcaggagccagggaccgagcaggggcccactcaccacagccaccgcattggaggagagcagctcctggggggacatggccgtgaagtaggcaatgttggtgaacgtgtacacgaaggtcaccagtgggatggagatgaagatggcgcgaggtaggttcctggtgacaggcagtggagtgcgtcagcgtcagctcctgagggtgcaggacccccgagacccagccacgagagcagctcatagtctccatctcttgtgtctgctggggatgttggggcaggaaagggggcagcattgctgcccgagacacagggaccctgttgtctgccctgccccacccccacctggacacaggctggtaggatgggagatgggggaggggccccatcacatcctgaggacagggtctgatgtctgtgcagaaagataaaatcgcatacagccaaaatcagcctggaaaattccccaaaatggccccagagcccagtccacagacccagagtcttcctggaactttccagtcccagctcgctcagctgcaaaggtttactgtcgagatccctggccgagcatcagacgcagtcattggcttcatttgtagggaccatattgtgtgtatatgcataattttaggccaaatgcaaatctctggatctatttacagcaggatgatgatattcagcctttctgaggccctgcaaggggctgtgacgtgtccatagccagagagaacagggccaggctagaatgcaagccccccggctttcttcccagggccatttttgcagggcaacaggcgtgggccaccgaggaccagcccgagccttgggtggcagtggggctgggcggagaggctgcctgtcccaccagagggcctggctgcttcccagggcccagttgggggccccactcactttcgggcgtcaaccatctcctcggtgacatagttgaggaagttccagccactgaaggcgaaggagccctggaggaaggccagggccaggtgtcccacggagggcgtcatccagaaagcaaaggcattgctgggcctcagctcctcgaagtgtcctggaggcccagaagtcgggggtcagcaccatctccccagcccggcccttaccccgactcggccctaccttggaagatctggagaaggcccacgccgatgatgagggacaaggccagcagcttcccgcctgtgaacatgtcctggatgcgcgtggcccagcgcacactggagctgttcacccatgtcaggagcactgcggagggaaggcgggggtgggcgccgaggccgggacctttcacagtggaccatggccaagtccagcccaggcggcccgagaatggcatcccctatagcagctggaattttctgaagggaaatttcacccctctgtcctcctgctcagggcaggatggagcccgggcaggtggctgatctggggacagtgggccaaaggggatgcttactcaggcaggccatggacagcacccgggaggctgtggtgggggggatgcagttggggaacacgggctgcagcacgtagttggagaaggtcatggagatgacagcaaggctggtggggtacatgatgaggacggcgctccagagcagcagaaagctggaaggagcaggggcgggagtggctcaagctgcccagagcccttcccggccaacctggccctgatgtgtgcagcagggctgccctgggcctggcgcccgggggctggcgaggctgccagaggccagcaccggtccagggaggcagggttgaccttgttgaggtcttgcggctgcattgatagactgttttaacagagaaggtgttacccgtacttaaacattgacaaggctgctgtggggcaggcgctgggaacaacataggcaccaaacgcttttcttttcttttttctttttttttttttgagacggagtcttgctctgtcacccaggctggagtgcagtggcatgatctcggctcactgcaacctccacctctcgggttcatgccattcttctgcctcagtctcccaagtagctgggactacaggcgcctgccaccatgcctggcaaattttttgtatttttagtagagacggagtttcaccgtgttagccaggatggtcttgatctcctgacctcgtgatccacccgcctcggcctcccaaagtgttgggattacaggcgtgagccactgcgcccagtcaccaaatgcttttctaataacaactaggccccccattggacggaggctgtctcctgagccagggtccctgtccccagacctctcggcttcagccctggctctcgcagagtactgtggctgaagatgggtgactctgagctgtgttccccctgagggagacctatggggtgcagagactagaccttaccaagagccctagctgggggtggagagtgatggatgccccttctacctaaatcttgcctctgcagggcacccagactgtgagtctgacctgttctcaggggctttcctgcacccaggggtgggtctgcccttgggggtggtcctagcccctggccagccctccagggagaggactgcctcatcggggacatcagccatctctggatcacctgccccttgctctgcacaaccatccctgctgggcttctgggacatcctagctccatggccctcctcccctgccaggcatcccctctgcccatccccgcatgttccgtgcccagggatgaggtcctggccctcttctccctcccgaacgtcctctccaggcccgaagcatgattattctgctttcttgggtcccagcccctttgaggaccctctccccagaggagactgccacagatgcacccacagcagcgtgcaagccctggcacgtctccccatccaaggctgcccagttaagggtccccggcccatatccctcagaaccaaactttgtaaatttcagcccagacttttcctctgagccccagaccatctaggagcctctcagtagggaagtgggtgccacctccgctgcacccacctctccctctgctatgctggctgccctatcctctcgaatcaggctcctaaacgattttagaatctgcctgtacctttgcagctcttggcacaacgcagctggacaaatacaacagcttcaatcccctgatgctctccaagccccggcacctgccgtaaacccaacctgacctcacctctagctacagcagactccctgcgctcacctgggccaccacaccctctgttcacacttcccccatcctgggatgctttcctcactggtcagctaggcccggtggggaaaatcttcttcctcccagccttagggcaagcattgctttcctgggagtcctccctagatggcgcacaccgttctctttgctgtgtagctgctgcctcttgtacacactctcaaagcaaggctcatccaggccttaatcccatttaaggggctgcttcctctctgttctgtgagcagcttgagtacagggacagacctttctatcactgcctccccacccccaggctcacggtaggtgctcagcaaatattccctggtgaacgaaggaaggatagcagggtgctaaggaaaggagacctctggctgggtgcagtgcctcactcctgtaatcctagcacttgggaggctgaggcgggtggatcacctgaggtcaggagttcaagaccagcctggccaacatggtgaaaccccgtctctactaaaaatacaaaaaaattagccaggcgtggtggcgggcgcctataatcccagctactcgggagtctgaggcaggagaatcacttgaacctgggaggcagaggttgcagtgagctgagatcacgccattgcactccagcctgggcaacagagcgagactctgtctcaaaaaaaaaaaaaaaaaaaaggaccttatgcagggtatatggtaagaatatcacacttccttccttgctcctcatgcaacatatgggtttaccaaaattgaggcccctcctcgcctgggcactcacattacctagggttttcagacagtaagaatcccccctccttaagtacaaggcagggggtggggttcagagggacctctatttaaaaggagatccagagaggcccaggggcctgcaggagtgcccagcacacatcagtggggtggagtgggcctcagttccacctgccctgtcctcagaaggctgtccagcacccccacaccttctctccatccagcccccacaccttctctccatccaccccccacaccttctctccatccacccccacgacctccctaggaagccggaagcaggagtggaaactgatgccagggctcatttggccatcccattcccaagagggtgtccccctgcccgctggtgccccacactcacccagccaggcccccgaagatctctgtgacgtaggcgtagtccccgccagacttggggatggcgactcccagctctgcatagcagagggagcccagagccgtcacgcccccacccaggacccagacgaacagggccagacccacggagcctgagtgctccaggacccccttgggcgagatgaagatgcccgagccgatgatgttccctgcagggggagagatggggaggcatcaggcctggggtccccttcgcagcccggccttctgtgtggggatctgcctgctgccaggaggaagacagcccggggtgcttcccggaggaggaggaggcaggaggtgggctggaggtgttgaatgccactggcccccaagcccagcaagtgccattctgggctcatcatctgccccttcctcagtccctcacataggaaatggcacctcgttcagctggccaggcccctctgccagagacaggccctgtttgactttctcagccctccattgcccccgtgaggcggggccagcaaagtgaggaggctgaaccacctgagcgacggcagacggtggctcctcaggcaccccacaaggcccatgctcagccctcccgtctacctcagagccccaggcatatcagcatgcagccacttgtcctgcctccatccagcccactggccagagctggcccctaacacaggacttcaaccactctcctgccactttcccaccggccaaagtccagactcatggagtggctcaggaaatagcatctcctccatgaagccctccttgaccacatcaggtttgggcttctcttcctacttcaatttcctttcctttcctttctcctttcctttcctttctcttttccccttcccttccctttccttccctccgcttcctggattcaagcaattctcctgcctcagccttccaagtagttagaattacaggcatgagccaccacgcctggctaatattttttgtacttttttagtagagatggggtttcaccctgtggatcaggctggtctcgaactcctgactgcaagtgatccacccgcctcggcctcccaaagtgctgggattacaggcatgagtcactgtgcccagcttctttctttcatttagacagggtctcgctctgccaccctggctggagtgcagtggtgcgatcatagcttactgcagcctgggactcctgggctcaagagattctcccacgtcagtctccctagtagctgggactccaggtgtattaccacacccaggttttttttttttttactttttgtagagacaggttctcactatattgcctaggctggtctccaactcctgggctcaagtgaccctccctgcttggattcccaaagtgctaggattacaggtgagtgccaccacacccggctaatcaaaaaaaaattgtagagttgaggggtcccactatgttgctgaggctggtctcgaactcctgggctcaattgaccacccacttcggcctcccgaagtgctgggattacaggcgagagccactgtgcccagcccctctgctttctgacatgatgggaaacattcaggggggccaactatggtctgtagagtaggttcccaggatgagcaagactctgagtgcctgctgagccctgagctccgcaaagagggacaatgttctgggttatatgggtctcaccatctgtgcacatgaatccggtaacttcaccagagatctgcactagggcctgtccaagaagaaataaacccagaacctcagaccatatgaacaaacagccctggtagaacctgtaggtcctggtaggaccaacatcgttctctatgcaatggccacaccagaccgggtcctgagaggacgggtccatctccctcagagcgggagcccgcctcctccacctgccgggcccgcagggggctggataaggacacggttgtagctgccaatttgtattcactccttgtccacggtgctcccccactgcccccacccccagccgacacagatttccagtctggacagctacgacgccccactcagttttccagtcacatcccaggagccctaaatacatccagataaggacgaactaattcctgtgccccagcccccagaggtaagctgtacccttagtctacttctcgggggagagagagaagcgcctctctcatctagcagaggggcccaggcctgggtgggctgtaaggtttctaaagagcctttgagttccctccatccggcagcagggcctctgttctcaggacctggcggactgggatttgccgaaagccagggaggttggaagccagcgggggctgggtggccttggaaggagctgagcatgttcacgctgggagcatcccaggccctgagccacccaccctgcagagagcccaccatgcttctgcttggtggggcctcctgggtggagctccggggtaagccacatctggcaccctatcttccagggctgtatcactagccttgtgcccagtggctgaagactcagatactgggcttgccaggggtggagaggccactattgtttggaacacgtggcctcaggccacagttcaggactttctcccttgtggctcaaaggaccacaggcgttagccagtgtctctgaggtcctcaggggtttctccctctgggcctagaccactcgcagcatctccctcaggatcatgtttgaaggtggcagaaaatcgcatcacgcactccgcacactggctgctcccggcaccatgaaggatgggtggggcactgcatggagcagccggggctgcgggcttgggcacggaggagggagggggctgtggacagggatgggggcctccaatgctctaatgattataggaggggtatgggagggaccggtggatttctttctttctttctttcttttttttttttttttagtagagatggggtttcaccatgttggccaggctggtctcgaactcctgacctcaagtgatccacccacctcagcctcccaaagtgctgggattacaggcatgagccaccacacctggccagattagtggagctggaagggggctgccctgggttcctcccagtggtgtgggaaggtcggagggtctcccttcccagactctgtatttcagccaagcagatctacctgattcggggagcagcaatgaagaagcccagccgttgggggaacctggtttagaggggcaggaactcagagtggaacaggatgagggggcacgggatgggcctggagataccgctgagcccctgttgggtgtctgacccatggctgaccagagagatgtaggttctgaggcctccacgttcctgtccacccggtgggatgacagctcagtggtccctgcaggtcctccgtgggccagagctccgggcaggtaggcgaggaagtgactgccccccaagtcggccttcccagagtctccaccacccgcccctcttccctgagccttcgctgggtagcttttatcacattaagatgtttggcctgatggggcttactcagcttcttggaggaacgaagaaagggccattgttccccgtggccgctgcggtgcatgctgacctatttctggaggcagcggcagaccactgaggtcacaggggcggcccacggaggtcgagtcgcagagtgagccacctcctgtggtgtgtggggaatgtgcagtctgatttggggagggggcagggagggcctgtcaggccaggacactggcaccagtcctcatgccttgaagcacattctggacccgactgtgtgactcaggccagtgctgcccttccgagccccagtttccccatctgccaggtggggccactgggctagggggcagcagagggctagtccaaccgtgacttcagcagaggggatgcaccctgcatatctgtgctgggccaaggaaacagtctgctcagggaacatgtccctcactgtggcaggcctctgcccagctcactggtctccctgaagcagcaccacctccaggaagctcttcctgaccagccaccctggcccctgcaatctggacatcgccccacggccacggtacctggatgatggctgggaagggatgcttttatttgatgcaggcattctcttgatcccgtctggcacatcagaggccatgggaagtgcttttggatctccctacgcactgccatctgccttggagaccccctaggcagccccatctttcctctgagacctgagccacccgggaccccaacaccccggggtgatcggctgcggcctgggtgaagcctactcgcctcaagcgcacgggtgtcctcacatcctcacggtaagcctgtgtcaggtacctctccgggatgctgactgtgactactgaggtctgggcagcaccccaaggaggtgagtggggacatccaggatgtgcctggaactgccacttggccggcacccgactccagcctaacccactttcctttggagacaggagatgagcggaagtgtgcggccctctccggctcgttcggctcagccagcccagccaagcaaacctcgcccagggccctgtctcctggctgaggcttctcatggtcaccggtgagttccacgttgccaaacgcaacagtcgagccctaggccacgttattgacgcatcagcaacatgtggcaagtggattgcttcctcctcactcggcctcctggcctcccctcggccttaccggcttctccttttcagaatcccttatcttgcttgacttccagacactgggtgcccagggctcagtcctggggcttcttctcttttctttctatgctttcttgatagatagatagacctcatctattaccttgacttctgctggcaactcctaaatttatatccctagcatagactgctctgctaaatgaaatctgtatatgcaacgaaccactcagccgcggacatcacagactttccgtgttcaaaacggaattcccgacttttacctccttgcccccagaatgctcctctcgatcttccctgatgaataaatggcaaaacgtcctcccaattgcttgggccacaaccttgagtcacccatggttcctctctttctcccccaggacctctattccatcacaaatccttcggctctcatcttccaaactcatccggaatggaacctcctctgacaccaccatggccaccgccctgccctgagccaccgtggtctcttgcccggggagacccaggtagcctcctgaccggccttcctcctcccacttcttcccccactgcctcttctccatagtgggccctgtaagccccatcccatcatccctctgctcaaagcccagggctcctgcttcacagagagcaaaaggcaatgcccttaacatagcttgcaatgccttgctcacactgaaccccaccccagatctcagctcatttccaagctgcaatccccgaccctggctctctccatcctccttcctggctggactgtctggtcttagcacttaacaatacacacattcagcttgttcatcttgttgcgggactcccacaccagaagatggattttgtctgtcttgacccccccatggtgtctctggcatgtaagccagtgcctgacaccgttcagtatgtagtggttgaataaatggatgagtgtgcccaggactgacaggtccccgaaattatagttggggcttcccttggggtcctggagcacaccgagggcatctgaccccagggcaggttgcctcagtttcctcacctgtaaatggaactgtagtggggaacagctaagcccctgcacagttgtatggctcctcagggccccggtgaggaggggctggggttctgcagaggtccacccctctgggaagcccagccacctgcagccctggagaccagggagggtcctggctgaggctgggtgagcagggattggttcctgaggagttgaggttcatgatgtcaactcctgagtcactgaacacacatctggcccacaaacccctgcaggagccggactctcaagtcaaagagagagcagaggaagggcctggtcagcagacccaggggggactcccactttggaggatctgggtgtgttccttgggttgtggatccggcaagggagctggccgaggttcctgggtcagtatgagaggccctgtgagtccagccgccgatggggaggcagacttccctggccgtctgtctgtttgtccacccatagtggagcaggagctcagtgaagcctagttggacaagctcccagcttggtccccaaccctcccccgtcagggctctgactctggccccaatttgcccagcatcagaacagtataaagggcactgggaccgggcatgatggctcccgcctgtaaccctaacactctgggaggctgaggtgggaggatcacttgagcctaggaatttgagatcagcctgggcaacatggcaaaacccagtctctacaaaaaatacaaaaattagccaggtgtggtggcgggcacctgtggttccaggtgtttggaaggctgaggtgggaggattgcttgagcctgggaggtcgaggctgcagtgagctatgatcatgccactgcactatagtttgtgctatggagcaagagtttgttttaataaaataaaatataaaataaaatataaaataaaataaaataaaataaataaaataaaataaaataaataaaataaaataaaataaaataaaataaaataggcactggactgggaacagagcccaaatctggttccaaatcctgagcctaccccttggagcagtatcatttcacttccaaccttagtttccactctgtaaaatgggtataaaaattcctaccttgcaaggtgggcatgagattcaaatgagataaaggaagaacatgttttcataaggcagtaagaggtgtttttctgaacagatattggatgtgatgatgtcctgcagagcccctgccccagccagttctatttcctccagcctggccgattcccttccatctgtgcttgcagtggccggcgggcactgccctaaacacactatacatgagtctcacgccagcccatagcccacccttccaggtcttcccattctcaaaagcctcaattcccagtctgagctggagcagagggtatacacgagggagagagtgacaggatctcctaggagggtcgctgtggaagttttggaaataacatgttcaataacaataacaaaccaaggtagattatgaagcaggacgttggctgggcagggtggctcacacctgtaatcccagcactttgggaggccaaggcaggcagatcacttgaggttaggagttcgagaccagcctggccaacatggtgaaactctgtctctactgaaaatacaaaaattagctggacatggtggtgtgtgcctgtaatcctagctacttgggaggctgacgcaggagaattacttgaaccccggaggtggaggttgcaatgagctgagattgtgccactgcactccagcctaggggacacagccagactctgtctcagaaaaaaaaaaaaaaaaaaagaaagaaaaagaaaggaaaggaaaggaagcaggacgtcaagttcttgacttttagagctaaaatatgacactttgcagacatttttgattctgaccaggctccccagggtattggtggagagagagtgagcccacctggggcagaaaggtggggtgggctggggaggggagacccttagtacatcaggtggggaaggcagtgcagaccccagctcagtcctcacctgcccagtccccacctcctatcaccttctggttgaggttgatctccttgttttttcctgcctcgtccagcctcctgcctgctgtaatcctcaaaggctccccgggccaggccaagatcaaggctccccaagaccaccactgagtgccccgggcttgggttctgtagctgaatccagcatccttggttagctaagtggcccttcaccctggctcagtgttcaaggtttggaggccaaggtagtggacctggcacagcaggaaggaactgaagggtaggggagctgtcagggcagacctgggctgcatgggaaacttacagagtctgtcctggaaaaggagggtgatagtggagttggccttctccactcccaccaccaccacctctaccatcaccaccaccaccaccaccaccaccaccaccaccaccaccaccaccagggcccctttctggggagaaaggagccaggcagcctccctgtggcctggggaggatgggatgtggggaggggatagagtaggaagacaggtcaaggatgctgggcttagctgaggagcccaggcagagctgtgtctttctgcacctgcctggcactgtagctggttctaggcatggtctcaatcctatgacccactcatggtgtgagcttccccttccctggaggacagttcctggagagggtgtgggccaagaaaaagctctaaccagcaccctggccaaatccctggaaccagcccttccttccagcagaccgtccatcaggcaggggcatcctaggccaagaagctcccagggccaggtcaggaccaggctctgggagacagcattctaaggggagggggtgagatggcggagtgacctggccaggggctgtgttcaggggcaactctggatgtgaagagctgctaatgtgggggtgggagaggacgaggtgaagaccctgggtctgccctactgagcccccaaactttctccatctccaggggtctgagggtgggaaggcagtgaagacacaagtggctctcactggcaggggaccgggaagactggctggcggtaaggtgagaacagtcgaggccccagtcactcaccccccaaaccacttctcctgtccctccctggaggggctcagaggcactctgtgtagacaaagaaacaagtcagtatccatgacttgggacagagagtggaaaaataccactgccattcccatgacctctgagctctctgcctgcccagaaacccctatgtgggggcaggacatggacccattctcaggtggggactttggagtccagggcctccagaccaggcgagtgtccagtgcccaccaggatcccagctcagggagcagctggccttctgcaggctgggtctgcccactgctgcccccaattgctggctaacccgccccctctcctgggtcctgctgccaaaccctgcagtcattgcctgctctgaacctccgtcccttctgcgcaggctgcgcttgctcactctgctcataggccctcctgctttccaagaataaagtcactgcactgcgtggcacctggaccctgcacacagtaggtactcagactgacccacagtacagaacttggggagctcagcctgccgcagcctgaccagcccctacactggtcaagttcctgcgctaatcgcaggactgcagtcatggccatttcacagatgaggaaactgagggtaactgccttgcaaaagccccgcagcaaaatcgagtcaggaggaagagtccagcggtggaggggacccaaaactcccccaggtgcaggcggccgggaggtgggaacacggagctttggcaccctgggccagcagcccctgacctccccgcggtcatagcgctctctgaggccagactgcaggttccccaggcagacccgtccgagcgcccggagaggggacgcccctcgttcggagcggctgcgcccctcattcggcctccgcccggcgcccgcccgcctgggtcccgctcaccgatgatgatggtgcaggcgctcagcagcccgatctccttcttgagcgccacccgctccgaggcgccggggacggtccctgggactggggagggcgagggcgcaggcctggggttcccgcgcccgctcggctgctgcgtgtggccggccatgtcgctgtcccgccgcgtccccgctccctgcgctgccccgtctgtccggccggccgcccgtcggtccgtcggtccgtgagctcacggccctcgcagccgggacagcgcccacaggcgggcgcatgcgctggctccgggcccgggactgggggccccgggcggcgggggcccgggaggggcggaaggagggccggcccacagccccctcccccacctcccttaaagggaacgccccctcccccagtcccggcctgggaaggaaggagaggacttggggcagatctaggaaggacttcccagttgggcgaaggaagggaccctccagttgcctgagttacatccattcttggggccgggttggggagcagagctccgagacaagacaatccctgctctcagggaggccgagggggacggcaagaataacagctggccgcgtgtggggatgcagtgtgtgctccctttagtactctatgcctgcacgatgtgtgtgtgtgtgtgtgtgtgtgtgtgtgtgtgtgtgtgtgtgtaggagacagctcccagggtgagtccattctacaggtggaagttgaagcccagagatcagtagcgatcgccgagcaagtgcagggctgagaccaaaccctttctcgtgcctcctgaggctcccaggcggacaacctcaggaggggtgggggttgaggtctggaactcctctgaggggtctgggtgtcctatgcaccctggatcaaaggcctgagggtcgaggtgaagatcccgggggctctcatcctcatcacggggacccaagacctgtgacgagtcctggacacggctcgcccaccctaccaggctctgggccacctctggcctgagatcttcactacaggctcctcgtcccaggtcagagtgagggctcagcggactagaactcgggtctctggtgcaggtcccgcgcgatccagcccggctcaagaaggccaggcgacctggaatgcccgggagacacggagaaggaggctgtggtcgcgggagagggtcgggagtgcggggatccgagggaggctgcctcctcccggaagccgtccggactgtgcagccgaggccggcggaaaagatccaggggggccgcgtcggggccaccggggcggcgggcggggcgagcctggcactgtgcggccggcggcggaacagcctttgtttcttcctggcggccgccgcgacgcgccgtcccctgcatgtggatgaggcctcgccgggcgccccgtccttccccccagtggcggcctccgggtttgctggggccctgccaggggtccgacggctgcagggtggaccggggtgggacggggcgggggcgggtccctggcaggggcgggtccctggcagcggcagggcctggaggtgggagcggggcggggccggcgtttgcaggcacacaggagcttcgaagttgggggcggggacttggggtaggagtaggagcgggaggatccagggtggacgtgctggtgggacgccgagggggaggccacccggcgaagctgcatccctctcgcttctgtcgtcggagaccggcattcttggcgccctccacctccagccccagagaccattcagaggccgactctcttaaaggagcctcgcgcagggtaggggcagccctggctccggagacccctgattgtcgcgggtgttaggggccagaggcctcgaccttctggtttgactctccccagccccccagttgccctcgcaattctagggtctgctgggagagggtctagccagggctggtgcaatcaggggcagcttgccaaggggcaggggctggcgcaagcctcgcagctctgaagcctgtggttttcgagggtgtctctctgggacctggaatgtggagtatgcgtttgtgggggaaaggtcggcctagggctttgcacaggatggagtttgtatgttgtcagccaggccccatagctcaggaggtccttttcgtggaattgaactagaacctgcaaatttcaatgggaacaaaaggttagtaggattggtttaccatccaaaaaccaatcagcatgattctccacattaatagagagaaaaaaggaaaacctcaacagatgcaaaaaacagtcatccgtgatgtaaacaaacaactcttagcaaatagaaacagaagagaacctccttaatctgataaaagtatctacctaaaaacaaatctccaagaaaccaagaaacaaacaaaaaccctacagctgacatcatgtttagtggtgaaagtgtgaatgcttttctactgagattgaaaatgagaagggatgttggcacttgtcaatattctatacaatagtgtactggaggtcctagccagagcaataagacaagaaaaataagtaaaaaggtatgaagatagtaaagggaaagataaagctgccattcacatatgatgtgattcagtatgtagaaaaaaaattacaggttaatttaaggaagataagttcatttagcaaagtcgctagacagaagtttaatatacagaaactaattgtattctatatactagaaataattagaaaatgaaattaataatagcataaaatcaaatacctaaaaataattctagtgaatgatgtgtacaatttttatgcaagaaactacaaaacatttctgagagaaattgttaaagacataagctaatggagggatataccatgttcatggattggaatttaaaatgttggtctccacattgatttatagaattgataaatacatccaatgtaattttgatcaaagcaccagacaactttgttgttgattacaaggcttttttggagggatgaaactcaacaagctgattctaaagagtatgtgaagaagaacaaatctggaggacttatactacagtaaggaagacagtgtggcattgatgcaaagataaacaaatctactggtggaagaaaacagaaatccagaaacagacccatcctggtttattatgacaaagttgatattgcagaacagtggagaaaggacgggcttttcaataagtggtggtggatctatatattgaagaaaaaaaccaaaacccttttaatgtcacccttccattataccctaaaaccagtcccaggtgatgtacatgtgaaatgtacgtgtgaaaggtgaaacatcaaagctgctagaagaaaactcaggggagagaatagatacattttcttaaacagacataagaaacacagtaagaaagtgacagattggactacattaagattagaaacttctgtcagtcaaaagacatgattaaagaggaaagagtaagccacatatgagagaagttatttccatacatatggccgataaaggacttctatctaaaaatataagcatatgagttgtattgaaaaatatgtatcaaatcaataggaaaaagttttaaaataggccgggcatggtggttcatgcctgtaaccccagcacttgggaagggcaaggcaggtgaatcacttgaggtcaggagttcgagaccagcctggccaacatggtgaaaccctgtctctactaaaaatgcagagattggccgggggtggtggtgagtgcctgtggtcccagctagtcaggaggccgaggcaggagaatcgcttgaacctgcgaggcggaggttgaagtgagctgagatcatgccactgcactctagcctgggcaacagagcgagactccatctcaaaaaaaaaaaaaaaaaaaaaaaaaacaaaggactttaaataggtgcttcccaaaagaggatgtccaatgactgttaaactcctgaacaggcactcaaacctcatgggccatcagggaaatgcaaattaaaacgagaataagataccactgagtagccaccaaaatggtgaaaattacacacccaatgttggcaaggatgtggagttggtaccaccagtttggaaaaccatttggcagtacctccaaatccagcatctccactctgtattagatgcctcttggatatcacgccacctccccagcccctagcctcaccttggtgtcaaggctttgccacctttcctcccacttcaggtgcaggtacaacctgccagcaccccccatcaccctcagggattctctgatgcccctgaggaatgagataataagggaccaatctggcacccacaaacttgcaatcagaaatgcaggagagttagcacactcgggcctatccttgtgttactgaatggtgccacacagttccaggatctgggcgacttgaacaaagaattggaagagacatatacagatagcaaaaagtgtattaagtgcagtattccactcttggagaggaagagtggactgatctttgtgagatgagatcggcattagtttggtgtactttgggtctttctatatgttgtttttttccccctcttcccaaggctgcctaatctctagccagtgtctatctttttgattgacaggtgtgttgcttagttactttggcccccgtgcgcttgcaccttgcctccatcccataatcctaagtacatacatgatatgcagctcatatgcatgaaccttaagtagctgattatcataacggggttatgttaaggataccttttctctccaatgcacatgcccatctctgaagcgcagccccttactggtttggtcaggatcctgccggccatgggatactgctcgcttttttttttttttttgagacggagtctcactcttgtcatccaggctggagtgcggtagcgcaatctcggtggctcactgcaacctctgcctcccggttcaagcaattttcctgcctcagcctcctgagtagctggtaattagaggcgcccaccaccacgcccggctaatttttgtatttttagtagacagtgggtttcaccatgttggccaggctggtcttgaacccctgacctcaggtaatcctcccgcttcagcctcccaaagtgctgggattacaggcatgagccacggcacccggccctgctcacttttttatcttacttttgttttggctgctgaacctctgctttttgtctggcttcttgctcacctgccccttcaccttgcttcttctgctctctgcttttacttattctgccctttatccaactttcaattccctttgctactttcctgcctcattttccctgttctcctatctcacttggacaatggcagatggataaatggcagatgggagtcagtggataaattcttccctctacctcatcccagatggacccttatgaatcatattccttataaaaacctcttggaagatgttactacaagattcagcatcagctgcctttggcaccaagtggtggccaactctgaaactcaccctcatattggctctcatgccatccctgttcacttcctttcccccttactcttgcttccctgcaattgcatcccccagttaagttctacctaaggccaggcaccctggctcatgcctgtaatcccagtaccttgggaggttgatgggggagaatcgtttgaggccaggagtttgagaccagcctggggaacatagtgagaccccatctctgcaaagaatttaaaaattagctgggcgtggtagtgcatgcttgtagtcccagctgctcaggaggctgaggtaggaggatcctttgagcccagaagtttgaggctgcagtgatgagctatgatggtaccactgtagtccagcctggatgacagagccagatcctatctctaaaaacacaaaacgaaacagaagtaccttctaagcttttgccccaggcactgctttctggagaggacgaactaagatacacccctaggtatgtctccaacagaaataaatatataaatgtactaaaaggcatttacgatatcattcatagcagtcttcctagtagccccaaactggaaacaacccagatagccattaacagtagaatggatgaacatgtttagagtacatgtaaattccggagttctgtgctacaaaggaaatgaacaaattactactatgttgcaacatggtgaatctcataaacaatgttgagcaacagaagctggacacaagattacattttgggatgattccattaattttttttaagagacggagactctgtcgcccaggctggagtgcaatggcaccatcgtagttcactgcagcctccaacatctgggctcaagtgatcctcccatctcagcctcctgagcagctacagctacaggcatgcacccccacgcctgactaatttttaaaatttttttgtagagacagggtctggctctgttgcccaggctggtcttgaattcttgggctcaagagatccagttctgggatgattgcatttatagttctagaataggcaaaatgaatgctgatgttagaagtcaagatagaggtttatccttaccttcttgggggtaggaactgggcagcaatttggggataggaactgaggaggggccctggagtgcagatcatgtctgacttattgatcggggtgctggtttcacgagtatgttcagtttatgaaaattcattaaggggaacactagatgattggtgcatgtttgtgtgtgtaggttacactctgacaaacatgggacattacacatggcctgggcagggtcctgggagggtcaggatctgcatgctgggagggggtctgcggcctgctctgactccctcgtgggtgttaaactcactcagcactcctacgccacttccattctctttgacactcccacgtccagcccaggtatctcctcaggcagccccagtctttccttggtttctaccatcctgaccccaaaccactccctctccaagctgcaagcacctgctagtttatggcctcctttctgcttctgtctcatggattctcagccctggacattgtttctgtcgtgcttgcctccttctctctccccaccttctctggccttgccctgcatttcctgcctcctctctgcaccctccctggacctccccaacaacaaccatgttcaacccttgcactggtgggccaagggcgcaaacacacatgcaagcccctcacccgggaggcctacatatttccaagttagagatgaaactgcacccacgatgcagccctcattcacacccggccctgcagcccgcccctggggcgtggtctcccctggttctcatggccgtcatccactggggtgggagctaagacagtgcccgagaaccctgggtgtgagcacgctcctgactgggggctggcctgggcaccctttcgccacctcgcttttccaacctggcatttccagggcattctaatctcctccccaaaatctcaccaaggagcaggacagggaaggagcgcagacaggtaccaggacaccaggctgcccagacacacacacacacaaccacacacaactacgtacaaccacacacaaccacacactcacacacatgcacagccatacacttacacacccacatgcatgaccacatacacactctcacacactcacatgcacccaaccacacactcatatctcacacactgtcttacacgaacaaccacacactcgctctcacatgcacacaaccacacactatcacacacacgtgcaaccgcatactctcacacactcacacgtacacaaccacacacacatgcacaaccacacattctcactgacatgcacacacccacacactcatacctcacacactctcacacgctgacatgcacaaccacacatacataatcacagacacagtctcacacactcacatgcacacaattacatacaaccacacacacaaccacacactcacacacctgcacaaccacattcactcacatacccagatgcatgaccacatatacactcactgtcacacacatgcacacaaccacacactacatacaaccacatacaaccccacacactcctaaacactcatgctcacaaccacacactcaaccacacacacaaccatatgcactcaaccacacagaaccacctacacggccactcatattcactctcacacagtgacatacacacaaccacacacaactacacactcacaaccacacacacaactgcatactcacacactctcacacactcatacacacaaccacacacacaaccgcacattcacaactacacacaaccatacagaacctctcacaccaccacacatttgcaatcacacacaaccactcacacactcatccacacacgcactcaacactcagccccacatctttgggcctgtggggtctttttttcgcatctgtcctctccgacaactcactgttgttcagttatcaacctttaaaacactcttacgagactgaaattaaaaaaaaaattctttgcatttgctgctggtgacgtcctggctctccagggcacggggtccacagcagagacccccttgcccaggtctaaggttggcctggcctgcatagctggtggggcttctagaatgaccacagggtgttgttccctgtaattttcaggctgtgacatcccacccagccccaacccatccctcctgtgagtggggtcgggatcccagttgccacgcccagagctccgaccaccccacctgggcctttcaccacctccccactcccccgtgcactgcacccccaccctgtcctgggggctgaaacagctcctccccaacccagggctgctgctccgaggtacaaatggaaccctccctgtctcggatcctcttctttcagcgcagccacaggctgtgaatgaccccacaggcaggtgtcaggagggagatcatttaattcatggtccaaactgagacaggtttgcaagtgaaaggaggcactatttataatcacagcagagtacaactgacagatataaaccaggacgtcccagcaaactggatggatggtcactctctttcaagccaataactccgactctgtgtgcccaaatacagcaggcattggtcacaccttgcctgctcctgctgcctccttggccgtaacttgtcacaccttgcctgctcctgctgcctccttggccgtaccttgtcacaccttcatgcttgtccctcatgagtcaggccaggcatcaccttggccaggaagcctcctggtccccagaatggaagacgtgcccattctgtgtccacattgccacctccccaggctcaaaggcagagacctggccttgcccccagcacatcacaggttctccatggaggttccaagtgtctgcctcacgagctgcgagatgcaggttctggtcccggctctgccattgacttacagactggacatggagcgtctcagtttttccctgtgaggtggagaggaaaagggcagcatgtgatccctcgctgcccacagctgttggacgggcagtttgcctgaactcgcctttcttgctccccaggtcctggggtcctaaaaggggcatggaggagggggtgacctgtcagggaggccaggtttcttgtatcttcctattatcccatgtcctcccctgaagccactgcattcacggccctgtgcagcccagtagggaacacgagaaggtagggcttggacttctgatctggaaccgggatctcctctccttccaggggttcccagccctgcatcctgtggggccagcctccgggaccagggtaccctctccgtgggacctttacccatatccttccatttaaggacacccgccattccaaaacgtgccaccagagggcagcctccgcgttggtccttgagaccaggtgcctgagctggacctagtggcctgactctcccgatgtcagagtccgggcctctgctggatcttgtattagagggctggggagaacaggctaggattcctgggcttctccggggaccactagagtcagctgggagccagggaagtccttcctgagagcggctcaggctcttttctgctgtagcccgagagaagagatgcaggggaggccccagggactgtgggtgctggcctgggtcaggacattcatagtgaaaccagagagatcttgcagtgagattcatttcgtgcagcgcacctgcctcggggcagggctgggaggcacggggaggcgatagagcccatgtggtggcggtggctgcgggagggaccggcgcttatctgatgggcctggcctttctcacagctcggtggagccgccctgccaggcccatcttggccggtgggtcggggctccgcaggccccgtgggctcagcctccccacctgcctggtgggcagggaggccttgagcctgggaaaggcgcgggcggccactgctggaggggagcgggcaccgtggggctgcgcgctgcggcgggctccccccacaggctccaagacacgtcaaaaccgggtacaaaaaattggggcaatctacgtgtttacttctaacaaatgaatgcttgtaacgtaaaaacaagactttgcacaccaccggggctgttcggatccgagaacgcatgggttcacgggaccctgtgggtggaggcccagctggatgtggcccctgggtggcggcatcctcagctctgccggtggctgggggactgtgcgtggaaggtcggtgagggaccccagaaaaaagtctaacagccaaaggcggaggttgcagtgagctgagattgtaccactgcactgtagccctgacgacagagggagactccatctcaaaagaaaaacaacatttttggttttgtttttttttttgctcattagctatcgttagtgttagtgtattttatgtgtggcccaagacaattcttcttccaatgtggtccagggaagccagaagattaggcccccttggtctaaggcaaagcagtctcagggtcagaagacctccaccccagctcgggcctgggtgaccctccctgcagagtgcctctctgagagcagggtaccagccacttgcaggggactgagctatctgctggaggagggttcaaaactggcccccagtcctgtgcttatgtgagtcaccagtgggctacccagcgccaccactcaggccctgcagacggatgtctgtggaagcactttcacagcgacatgtcacagggatggagaactgtggatgaggactctccaggctgaccagccggctctgccctgaccatgggttgggaccccaatcaacctagctggggctgggccctgccagaaggggcgcactagcctggcctgaccatgggatggaaatgggacattgtctgggggagaggggagtggggccagccctatgttatctccccttttcaaagaaggaaaaacccggcacagagagagggaatcatcggcccaaggcctcacatctggtaagcggggagctggagtaaccagaccctgaatcctgggggtctggtaaccgtgatcctgggaggcttggccacgtggtcctggggcttcctggccccctcctggcctgaggcactcatcccagccccgttgatttgatgggcagagacccagacctgccaatggctgggtgtggccagcctcgtgaactgagcggggcccggtggcttctgcccagagctgcctttgatctcaaaagtaggctacccccataggtgagacccgatgtgggcgctgctgtgctaaccccatgccccaggaccactgaaacctctcttgagcctccctggaccaaactacctggttgctctcagtcccttccacagcccctcgtcctccacctgcccctgcagtgccctggggctccctccagcgctcccatctcctcactttttggtttttttttttgagatagagtctcactgtcttgcccaggcgggagtgcagtggtgggattttggctcactgcaacctccgcctcccgggttcaagcgattctcctgcctcagcctcctgagtagctgggattacaggcatgcagaaccacgcctggctaatttttgtatttttagtacagatggggtttcaccatgttggccaggctggtctcgaactactgacctcaaatgatcctccccgcctcggcctcccaaagtgctgggattataggcatgagccactgtgcctggcctccctcactcttgacactttatgggcctgccatcttcactccttgctgcccacacccagatgttcctcctggcctcagacctttgcacccggcctcgctcaagctgagggtccagacattgatcttccttcactcccaggtctcacctcccttcccttagccatgggacatcctccttctgcagacaagaaccctggggtggtcctccctatcccctgccccccgtgagcatctaaacctggttcatctaaccagactccttctcctgctgtaaagaatcttattgtatctccttaccaccccaaagtaaaattcatagatcatagaatcccagccagactttcaaaatccatctaatgtcgtagctttaaaataaggaagaaataggccaggcacagtggctcatgctgtagtcccagcactttgggaggctgaggaggatcacacgaggccaggagttcaaggctgcggtgagccacgactgcgccactgcactccagctggggtgacagagcaagaccctgtctctaaaaacaataaataaataaaataaggaagaaataaaaggaaagtaatttataatttcattatgtatattcaactggaaagaggcctgggtgtgacctacagtggactcagatgtgggttgcacagaatggcagaggctgtcactgctgcagacacagacgggagcagggttaccctcagggctcaggtgcctgctggggccaccctgtgatcttggggatgtgtttctccaaaatggcaaatgcttcttggtaaatttccaaacaaaacaaagctccatctcccctcagctttcatgctcattgcatccctagaaattgtgcatctggaaaagacgccgaacagaagtagtcattcccgatagggtcattaccgatagggtttattagcaatcctacatcagagttcctcatgccccgcgctgtggatatgttgagcagaataactgctgtgcagtggggtatgctcggcagcagccctggcctctaccctctaaatgccagcagtacccctaggtcatgacaatcagaagtggctccagacactgagaaatgtcccctgaggggcaaaattgttcccagttggcgccccatccccacctcctgcccacacagaactccctcctctcttgtgtggggtgcggggcaacttgccaccaggcgggatgcccctcacacagcaggtccctgccaccccatgactacagcaccccattactgcagccagtgaaccccctcacacttctaaactaccccaggggagaagcaaaaccactgttgtgggcctctgacctccctgattctctaatctgggtgggtgtgggggcagtgatgccaagaagctccttcccttcccagcacacactgcaagatctgcggtcctcatttctcccaggcctggctactctgtaacagctgcatccttactggccctgtggggacatgggacgtgtccctgccgtggctcccagcggccccggtgtgctgggcctttctgcctcccttaattccaccttccctgttccagctgcttggaatgtcctcagtgcttttcctctgcagttaccctggaattccaggggagtgcttgggttggtggaaccttcttagcccaggtatcctcctcctccagggagccctccggaaatgtccctcccttgataggctggggccagcactccctccccggcttctttagcccatgggaggcagcatccactcattgtgttcctccttccctgcctcctgctcccccataccatcccttaacccagccagagtcattcctctttgtagcatcccagtcctggcccagagtctggctcctaaaaggcactataaatattggtggcaaagttgaggctgtgacactcagttcaattttttttttttttttttaaagagacaaggtcttacttactctgtcacccaggctggagtgcagtggtgcagtcatagctcactgcagcctcaaacctctgggctctagcaatcttccggctcagcatcctgagtagctggggttacaggtgtgaaccaccgtgcctagctaattaaaaagaaaaaaagtttttttgtagagacagggtctcaccatgttgcccaggctggtcttgaacttctggcctcaagcaactgtcccgcctcagcctcccaaagtgttgggattacgagtgtgaacttcaattcaattcaattggcccttcaattctgtgttcattcactgaagattccaatgcccctcccccatctaaagtggggcagaccagagggaggagcagtggaggcggggtggacagggtcccagcgctggaggagacccatctgtgagccacctggaatctcatctgcctgcccaaggcttctgccccttctacaggaatgggagtcccttcaggtggacataggagtttctccatctgaaagtgcccaccagggaagaactgcgccaatcccgatgggcactggggctgagggagggcactggggatgcaaggaccctctaactccacccatagaacccttttaggggcccaggcctccaggccagctccctggcacacaccacttgtggagtatgaacttccagcccctaagcctccgggctttgagcacagcctgggcagcagctgcaggcacactggggtgcccactcactcttcatcctgcccatgcctgcccatctctagccaaggtccataccatgcacacaggtgagtgctgtggggaagagcacacagaggctgcagctggccccccgggcaggtcctcagcccactaggcccctagcccaaccctggctgagaccccagcctgccctgtgggtgcccggcttctgtgacacctccgttgcataagcggggactagaggtcaggtgaaggctgcaggggagggggctctctagtggatgaggccacctcccagctggcagggctgagtgcatggcagtgagggacgcctgggtcctgggaaggcacaggaggtagagaccccgaggccctgccagcttccccgcgcaagcctgggaagcaaagtgcccacatcttctgtttctgtcagttcctgccaagtcccagtgcctacaactgggaaatggggcaagtcaccttctccttcctctcttggtggctctggaaggaaaaagccagtggtgtcacctgaaggcagcccctttaggcaggctgggtctggggtctcagatgcctggtgctgcccggtgctgctggccacgtgtgcccccgtgccttggttggcagggttctgggcagccccgcctacaggcctttccccccgttcttcgggctcccctgtgtgatgcaggcggcctggccctggcccggaagggaggccgctcttggctgatgctcacatgcccactcctgggcctggcctggctcctgggccctctcccatgcccatgtcctcgagggccaccaggagacgggccctggttggggcagacgtcgccttggggctggtccctcctgggcttctggctgggttggtgacctccttccccactgggttctggctgggtgttcacctggggctcctggctctgtcccaggttggctttcacagcagcaaccgtgaggcctggctgggaggaggtgggtggaaagtccaaggctcctcctctaggcctccctccccggggggactagctgatcacggggggtgctcctgggcaggcactcctgggggtgaggggtggttggggggtgcatgtggtccggtagggcactggagaagaccctctgcccagagggccccaggacaccccttcccataggcccacacggctctgtggccgtgtgcgtgggagggagggagggatgagtgtcacagcgggtgtgagtgcgcctgtgggtgaggcccggagagccggcacgggggcgggggaccgtgagaaccagtctgtgggtggagacctagggcaggggtgcccttcctttctgggatgtcccaggccaaggagtttgggggcttgggggcccacagtgcaagaggaaatcctggccactaggtgtcacccggagcccatgggacagaagcaggtcccccccaccgcccccggggaggggtcggagccccttacctcccaggtatgcccactcccgcagctggggggaatccctggtctgtcacggtgtctgagggtccactcgcagtggggagctggtggcacggcgttgccctgtgcaggaggccatatgctctatggaagcaccccgtccccacctcctgcccatacagacccagactgaggacggagccagtgacaggtggggatgcagcatccctcccagcccacccagcccctctgatgcccgggtgcctgcggcaggggccccctcgtgccagcccctccaagggagcagcttggacctatgcctgccgtgcttgccggcctcaggatggaggagggaagggtcctcgttcacaaccaccccccatcccccttaggtccagctcagcaaattagggtcccaaagccctgcccagaccactgggggccttttgcagcctttcagagctggtccccaccctcctgctgtgcatccactcatccaaagcacagcaaggacctactgtgtgctgggagggccctgcccggcggagctcacgtgtgatgggatgtcagccgccaaatatagaaaccagaaaatttgtttttattcatttatttatgagacagagtcttgctctgttgcccaggctggagtgcggtggcactatctgggctcactgcaacctccgcctcctgggttcaagtgattctcctgcctcagcctcttgagtagctgggactacaggcatgtgccaccatgacctgctaatttttgtagttttagtagagacagggtttcaccatgttggtcaggctggtctcaaactctgacctcaagtgatccatctgcctcagcctcccaatacaggcatgagccaccgtgcccggctaacacttatattttttgtacagggtttcaccatactggccaggatggtctcgaactccagacctcaggtgatcgcccgccttggcctcccaaagtgctgggattacaggtgtgagccactgtgcctggcctaaaccagagaatttgtaatggagacagtgacacacaggaaaacatcatggaggaactggaagggccgtgggtgaggtggcagctttggtggggcttgggggaggggagcacccccagggagggacttgtgagaaagtgaggaagagcatcagtgaggtgagcaccccagggaaaggcattagggcagctggaacagtccgtgctaaggccccaaggcaggaacgagccaaacctgtcagtgaaacaccaggacctgtgtggactggggcggtgatgcaggtgggaggtgggaggaaacagagggtcttggaccgtgttgccttctccccaggccctcagggaccatccctgccacagtggagccttttggctggcacatgaggctgtcctagccgaggctggtcctggctggtgaggagaagatgccatggctcagggggtcaaacgggatccaaccctcacatccctgtaggctgaggagcagatacaatcccaagagaggctgggtaaggtagctctcgcctgtaatcccagcacctggggaagccagtgtgggaggatttcttgagtccagcctgggcaacgtagcacgaccctgtctcaacaggtggaaagaaaaacaagaaaacccccccaaatacttagccaggcatggtggtgtgtgcctgtagtcccagttactcaggaggctgaggtgggaggatcgcttgagcccaggagtttgaggctgcagtgagctgtgatcataccactgcacgctagtgacagagtgagaccctgcttaaaaaaaaaaatcatggaggggccctttcctcactggctgagcggtccccaaggcagggcatggctggtctgtcccagctgccaggctcctagacagggtcttcttggctggggggcaaggttggctgaggtagggcagagggaagggcggcagaggtcctgtcccagcacccctctgctgctcagctctttgcagtatctgcacaccccagagtaaaaccaaagaccttgccacagcagtgaccctacacgcagccccagaagctcgttcacctcatcaactctccctgtcacccagctggcaccaccacactactccttaagtagggacgctcctgccccagggcttttgtgctggtggcacctctgcctggaatgccctttccccaaaaccctcagagctcctcaccccttcaccccactgcaggactctgccaaatgccaccttcccaggaagctttctctgcccgttccattgaaaagcacattccccacctcagcactttctttcctttccttttcttttcttttttcctccctccctctttctttctctctctttctttctctttctttctttctttctttctttctttctttctttctttctttctttctttctttctttctttctttctttctttcctctctttcttttctttctttctttctctctccttccttccttccctccttctctttctttcttttctctgtttctctctttctgtctttctctctttctttcttttttattttttagagaaagtctcactctctcatccaggctggagtgcagtggtgccatcagagctcactgcagtctcaaactcctgggctcaagcaatcttcccgcctcagcctcctgagtagctaggatcacaggtgagcaccaccatggctgactaacatttcttaagatttttttttcttttttgtagagacagggtctcactatgttgcccaggctggactcggactcctggcctcaaaggatcctcccaccttggcctccaatagtgctgggattacaggtgtgagtcactgcgcccggccaaccaccttggtattttctatcctctttgccctgcttctcccctgaccaccatgtgaacttctagatcttttacttgtttatttttatggcccatctctcccactacccacactaggctgcaagctgaatggtctgttttgtttaccaaggcatccacaccacctagcacagtgcccgcaaacacagcaacaaatacttgaatgaatgaatgggattgaataggacaaggctcccccatccttcctgacctcatctggccacagtaggaccaggatttgggccttagcatccacccatctccagcagaggccaaggcctaagcaaggtgtcgtgtgcctcaagacggccgagccactgaccacagcacatctgctcctgcttgatggtcctgggaactgcgttttacctgcagcaaatcacattcagtcacctcaggcaaacactgcaaggcgtgaaacgtgggcaatgtgctgtgccacacatgttacatggaggcactggggacatgtaggaggatgaaggaaactgcatcgcagggaagaggtgatgccttggggagagacaggcctcaactgtcctgcctcccctgggggaggtgtcagtggactactgagtgaagatgtcctgctatcagggtcccctcgtgccaagtttctagtggcaaggcagggcctcccctgggagcctctcacatacctgccccttcactagagggcatgaaatctactccagcccaaggctgcgcagctctgagatggaccctgtctctctgaattgcctcttctgattctcaagaggtatttaaagcggatctctacttgctttttacttatttttgagaaaagttctcactctgtcacccaggctagagggcagtggcatgatcacagctggctgcagcctcgaactcctgggctcaagctatcctcctgcctcagcctcccaaagtgctgggattacaggtgtaagccaccaggaccagcctcctcttgcttttggcttatccagtttccctaaattaattttgtgtgccttttaggagaagatggggtcagtaatgcattagagcccaattaatcattctaaaaaaagatctgattgagacatacttataaagcgactcctagagctgaaaggtcaaaatctagcctagatattgaaaaacatttttagagaaatgtattcgaaaagctcaatgctctttttaaggtgagaggtggggagcctcaaattttgggagcccttgaagggacctgaaggaaccccagggatttcttggagcataatttgaaaaccacagattaaactcaagatatcctcattgcagggaggaaccacattctgaggcctatttttatgacaatggctagtagagccagtctgcagtacctgatgtccccagtaggggtcacttctaggaggaagcctctgccaggccctggtgtaatcaaggagggctccaggcccaagtgggcccatgtgcctgtgtctgtgcctcagtgccagtgacttcaagcttgagtctgctctgagccaggcgccactacatgcccccccagtggacagagctgccctctggccacgccgccagctggctagggctgatcagaagccttcagtttcaggacagctgccagggtgtggaccatggggactggtaagagtttctggctaagtcctggccaagccattccaagggacagctgcagtgtctctccagtcagcacctggaagggggccagcccagcctcagacctggggccaaacacatgtgagtatgtgcaaacgtgcacacacgtgtccacaggcacacacaaatacacatgtgcatgaacacatgttcacacatgtactccatgcacaaaggaacacacacacaaataacatgcacatgcaagcacatgcactaacaagcgcatgaatgcacacacgtgcaaatgcacagggatgtgtgcacaaatcacatatgtgcacacactcacacagacaaacactccccactctgcctccccaggcaggctccaggaatggagaaacgcctttgcatccaatgtgtttggggtgagatcagctgggggaggggcctcttccctgcctccccagtcctggcagctcctcccttctgggccaggcttctcccctgtctggactggttggcatatgtgtatgggaggaggaaggggcagcaggaatgtcctaccacccccaggagctgctctgggcagaggcaggggatggcgcctttgctggactccctggctgcatctttctgggtggggggcactgggatggttcctgtatcccatagaagcaaactgggcagagggccgaggtgggtgctgtggtcactgtcaggcattgaagggacccggggtcatccctgaagcaggtcagcctgggagaggccttccaggcttgctgcagtcggcacccccccccacaggaagccagcccagccatagcctcctgcccttttgaagatgctccctcctggcttctgtccctgctggcaggctggggtttctgaacccctcattcctcagtcatctcgaccctgtgagagcctcagaggcctcctgatccctgttgtcccctggccatcctggagtgtcagcccggggctggccctgagctcattttcagcatgacaactggtcctcagctgacacccccatcccctcagcccaggaggccagctgtggtgggttctgctgaatccagcttgctaaccaccagcccatgcccacagtccctggcaggggacacagttctgccccctcccccaccagatcaatacctccaagactgctgtcagcaaatctttgacctctgacctggccacacacagtgacccctgaacctgttggtctttccaccaacccttgctctagtctctggggtgggtgaggggctgacaccctggctctggcctgggctgttaggggcagggagagggtgaggccatcagtccccaccagcccggcctcttcccttcactccacactcagggccacagtggttggtgttgttgggggggggatggatgcagtgggggatgtgccacctatgccaagcaggctgtgatgaaggattcggggattccttctggagcccaggggccctgggagctccagccatgagtgaagagccagcagcgaagaggatggcttcccatcctctctccaaggcccacaaaggtgcccacccctttctgctctgggccctccggatcgatctgggacccagcagccttgcagccctgacctgagaatgcaaaggggcctgtacagattgcttcctgagccctgttccttgcagctcagctgggagggtccctgtcctgcccacccatcctgccccagataagggtctagcccactgtctcgcagaaaccgtggtggaccccagtggtgctgttgggagccccacatcccgaaccaccctgggatacagcctcgggagtcctgcgctccctggcagacaccactgaccagggaccctgccttcaggaaatccggccaggacaacaggacctgcccctctggtgtccaggtcagctcaccatgtggccctttcctggcccgccttcccttgctcctgctcctaggaagagatgcctccacctccactcccccatggggcattctgaaggccatgggttccagcagtcctgtgctggcaccaactgggtctgcggtaggacaaggggcagtggctcagagactccagcagtgagacacttccctgtcccaggaggaggggaagaagaggagcaggaggaggaaggagagggagaggagggaggatggtcagggccccccactaaaatgggacaggcaggtgaggggtgcttggagtggagactatgctggaaactgaggctgagagaaggtagtcagaggcagagccacgcatgtgtgctccagtgcgcctgactccagggtcctcgcttctcctgactgcatcagactcgaccttgacctctgggtatgctgggtcagggcagagtgctgacgcactgcagagcccctcgggccccgcctctctgcttacgggggccttctcaggagccaggagggaccaacccaggtaggggactgtttggacgagtccaggccaggtggaggtgtgggcagccggccctgaggtcactgggtgtgtgtcaggggtggggattgtccaggaggcccctacagagcaacacgtcattctaaggctacatttcacactggcctcgggtatgaccttggccgtcccttctcccctaagcagtcctctgggctttctgggagccttggtttcttctccacttgagacctgggccagtcaggtgggaaaagccagcagccacggggggcctggtgcagaggaggaggtgggagaagcagcaggcggggggcgcccaaggagcctctctgcctaccttgggctcagccttgcacttgatgaccccacccgggcctgtgtgacaaccatgccactgacggggaactgagcctcggagaggggaggtgactcacagaggtgacccaggagatggaaccgcattgggagctggggctggacattccagccgctgccaggaaaatcctgccggaagagtgcactgtgcgggtgcccaggaggctgcgggtctgcacccagctcctccgacccggtgcccaggacccctgcctggctggccagagaggggaagtgcgccccgggcggccagcccgcagctgttgggcaacatctggagggaaggaggaggtgaggagcagagggcgtggagctgggtcctgacgtgtgcccgcgctgcccggcacccacgagggctggggcccggtgccacccgggggtctcagcctccttctagtcccacgagccctagaggacttcctagtccccctcgctgtgccctggggggtctgggctctgtcctagggggtctgggctgtgcacaacacaccacacccccgccccagatgggggctcctgaagacccatgctccaacacacaggcacacacagacacgcacagatacacacagatacacaccacacacagacacacagatacacacctcacacacacatcacacacacacacagatacacaccacatgcacacaccacacacagacacacagatacacacctcacacacacaccacacacacacatagatacacaccacacgcacacaccacacacagacacacagatacacacctcacacacacatctcacacacacacagatacacaccacatgcacacaccacacacagacacacagatacacacctcacacatacaccacacacacacacatagatacacaccacacgcacacaccacacacagagacacagatacacacctcacacatatatcacacagacacacagatgcacaacacacacaccaaacaccacacaaaccacacaaatacacaccacacacacaccagacatagacacacagatatgtacctcacacacatatcacacagacacacagatacataacacacaccacacacacacagatacacaccacatacataccacacacagacacacaacacacacagacatagacacacacagacatagacacacacaccacacacacagaggcacacacagacatgcatagacagatacacatagacacacatgcatacatcacacaccacacacacagatacacagatacacaccacatacataccatacacagacacagacacacatgcatacatcacacaccacacacacagatacacagatacacaccacatacataccatacacagacgcagacacacacaccacacacacagacacagatacacacaccacacataccacacacagaggcacacacagacagatgtagacagatacacatagacatagacacacacagacacacagatacacatcagacacacacacagcatacagacaccaaacacacaaacacaccacacatacacacaacacacacatataaacacacactacactcatagacacacacctcacacagacaccacacagacacagatagacacaggccacacacagagactgatacacaccacacacccacaccccacacacagacaccacactcacaccacacacacagatacagacacacacaccacactcacagacagagataaacacacacaccacactcaatagacacaccaagcaaacacacaccacacacacagacacacacaggcagacacacacgccaccctgaccctgtccacctatactcacggaccatgcctcctcgttggctgcacaaacccacatagactcgcagtcagccaccctgcaagggtcctcagccatgcgtcccctcccccacccctcagccccgtcagcccccgctggccaaggctggagctccaggcaggcttcctgggctgggtgcccctccctttgccctaggagatgtgcagggcaaacgagcacttccaggggattcccggggggcagggctgcggtggcttcatggacggggagctggatgccggccccctgaagcctccagcatggggcttgtcacctccttggggctgccctgaggaacctcctgccccctctagagccaagtccccctctgcaccctctggggtctgggtgggcacgaagggggccctcgtctttgactctccatattcccctcacgctggcctagggtggcctgcgggccccacctcactgatgtcctggattggaatgagggagttcagatgaaggggcccccacaccgtgtggggcctggcccatcggggctgccctggcctgggccaagacccaccatctgctccaggccatggagacgccttccccaggctcttcgtccaggccagacccagttctctgactctgagctggtcagggcagaagccccatcttggccatcagggcgccggggacctctgacctgctgcctccgtgtgacattccaccactccagccggattcttcctctgcaaagtgcccaaggcgccatgaagacgtgaagatatgaatactcctgggctacttgtgatgggattggagggggtggggcacggtcctggaaggagccgcttctccctagtccggtggggctcttccctgaggctgcagagattaggcagtggggttctgaagccccagtgctgtcctccctcccgggaggtggcccagaacggcaggaacaggcttgcaaatgcgcaggtgctgggctccatctcctgaggcatttttagggtggatgccctgccctcctgggcagagcagggcagtcgctgcctaggggcgtccctgctcaccaaggtcaccactgtcattcaccatcactcttttttaattattattattattttagacagagtctcgctctgtcacccaggctggagtgcagtggcacgatctcggctcactgcaacctcccctcccaggttcaagcaattctcctgcctcagcctcctgagtagcttgggactacaggcgcctgccaccatgcccagctaagttttgtattttagtagagacggagtttcgccatgttggccaggctggtcttgaactcctgacctcaggtgatctacctacctcggcctcccaaagtgctgggattacaggcgtgagccaccgcacctggccaactctttgttaattattattattactttttagagatgggagtctcactctgtcacagcctggagagcagtggtgccaccacagctcactgcagactcaaactcctgggctcaagtgcctccccagtagctggggttacaggcacgtgccaccatgtccccagctaattttttattttttgtagagatggggtcttgctatgttgcccaggttggtctcgaactcctggcctccagtgatcctcccacctcggcctcccaaggcagtgggattacaggcatgagccaccacacctggcctagtggccagcactcctgactgggcatcactgcccattcagactcacaactgccagtgccaatcattgcctactgggctttactggcagaagaaggttggcattggcagtggtagtggccactaggtctttagagtaatgacctggataaagacagcaaaggcgcccagattcctgagaggcttcccctgcccagcacagggtctaggggaggatgcagccttggcaggtattgagggtgagggcacagtgcccatagttggttccttttgaaccctggccctccttctggtcagctgcaggccacagtccccaacccttggctctgatccttctagaggacagtgggctgggctgtctgggcaggagtcacactcatggccaggatgggttgaaaatgggaagtggcccccagtgcctggtgggtgccagccattcttcttggctgtgggggcggctgcctctgggaagggccttagtcacccagcagcggcttccgggaacccggtgcccagtctctgggaaacatcacaggtttttccagcgggacccccccaccctgccctggggtggaccccaaggaccacggtgcagacacctgctgggaacgggccaggctggctctccagggtccctgctgcccccaggctgactgccaagctacccaccgcctctgcctacccttcgtgtggggcacagagctttgacctgcacttgcctggctccagagcccttcttggctcccaagaacccaggataaggcctgacactcggggtttttgccacctccatgctgccgacttctgtcaccacccccctccgttcctggcccctgcctcagccaagcggtcctggatattcctccctctgtcctacccccgagacatcaacagagtcagccccacccacccctccctagcctgcaggtcccatggctgtcctgtctctctagggtgccccaaacatctgggtgaggggcggccatcccaccagcgcatagcacactccctggaagactggaagattgtagatctcctgtctagtcctgttcatccactgagaactgggggctcactgaagcccaggctggcaggagtccctccccgcagctctgaagcccgccatccctcttcaggcactccctggccgctgcgcctccctgtggggtgggtagggggctggccctggaggccgatgacctgactttgattcccagctcgtctggtcccagcagccctgagagcccgcctgtgtccccctttcattgtctgcacctaatggggatcgtgtttgtgcacacaccatacagcagtgacatcggttcgtatgcaaggggcctggaacagtgttgggtagatagcaggtgctccgtctgtgctagctactgtcatggctactattgcagtctagcccaatgctatctttgtgttctcactcctccctggccagcagcggtggctgggagaggggtccaggagagccagcttccccatgtgggaagaggaatcaggccggggctgggcaccctccgtgagaggcacttctagccaagggtgccatgcagcctgtggccctgtcccctctccccacgcggccttctcacctggatacatctacagccagaagcacgtgtgtctgactccagagccccactctcccttgcacaaggtctccacctctgttccctgacctcggcccccacgagaaccctgcagacccccactgtggaggatctgcgcagcgagcctggtaaagggagactcaggagcccaagctcccacaggcagcggggtgggggccgtggggagcagcaggagccgttggtgtgagggagtggccaggccccaaaacagttagtctgtgctggtagagagaggctgggctcagggttgggccgagccaaattctgcaggtcacgtgcagctcagcccagccccttcttctgcagtcgcaatgctgaagacagggcaccaaggctcagcccagtcagtacccacagtccttggtgtgaggacaaggccagaccagggcctggagtcctccccattcctagcttggggctgtggctcccagctccccagcacaggggactccttctctaaccccataaggggatgtagatagcagcccctttatgctgactgctcacacctccccagacaccgcaggatgcagccaccacgccaaacaggtgttgagtgctccatttcacagatggggaaactgaggccctaagagggaaagggcagaggcatgggggccaggctctgggtttccatccctgtcattgcccccagactctgctgaatgtccccaccctcaaacacagcttgctgggctggagaagaccttgactgcccgaggtcgcaggtctgtccactgcagccccagccctcagccctgctggggcaactgctagaagccagcacgtcctgaaagcgtgagttcgttattccagctcatcttcccaggacctctgcaaggcaagcctgtgttgcagaagaggaaggcaaggcccagggagaagaggtgacctgcccagggtccatggccaggaacgagtggtattgagacttgaacttgggtctatctgagcccaggatcaaagtgtgaggagagtgaggcccagccatccaaggtctggtgcagggagaagcgggaaaatgaggccagggagctctgtggggaggggtcaccagagtggggcagggcttggcatcaggggcaccggaggctggcgttagctctggtatctattgcagctttttttggttacagggtctcactttgtcacccaggctggagtgcagtgctacaatcacagttcactgcagcctcaacctcctgggctcaaacgagcctcctgcctcagcctcccaagtagctgggactacaggtgtgcaccctatatccagctaccatttcattttactttttttttttagagacagtgtcttgctgtgttgcctaggctggttttgaactcctggcctcaagtgattctcccaccctggcctcccaaagcactgcaattataagcatgagcctctacatctggccagtttagcttttaataaaggccacaagagacataaatcagcgtgatgagtgagtgagtgactgtaagggtgaagactgtaggtaaggaggtcaggaaaaggatccctggtgggggtggggtggggtgatacttcagcgaagatgtaaaggacaagaaggagctgaccaagagtctagaaggggaagagtgtaccaggcagagggagccaccagtgccaaggccctgtggcgggaatgggtttggtgtatttcaggaacagacagggaccagatgatgtggttctcagatgcagccacccccaccatgcagatgacctgaattttgccccggatctgagtggggttgggttctgtctagctccggtcaacggaggatgccctggatcttgaagtgtgtggagggttcctgctgccacggaccaatagatggaggcctgtgacttttcctgggaggacgggccgggggaatacaggcactgatggcagcttgacacgaccgtagcagatggctcactcattccccgctgtgccccaggccgacccacagggccttctgaccctctgtgtgaggcatggagggtggtcctggggcagtgggaggcacgccagctctcaggacccattgcagcctgccctgactggatgcagccaagcctgttaacagcctctgaggactgagaaatccaccctttctggcactctccccagggaaagtgagccatgggaggcttgggtggaaagcactgacgagtttccactgagccaggggtgggtgtttcagaggggaagggaatatagaggcccagaggaaaacaatctgagctggcatagaggagagaagttgcagtgggtgaggaggccggggaagccctggaaagaagccctgagggcaggcgacggcccaggcagagatgcagggacagcgtggctgtgtcaagccagagcgggtccaaggctaaaggggtccctcgcagcctctgacacactctcaccaccttgccgggagcagacacagggctggctggctgggactctcttgctactttatctcattcttctcaggaacgtagctcagagtctgaccttggccttcagcactttcctatctgaagtgtccatccaaagcgaagccatcctccaaaagcccagatgaacacaccttgacatctgtctcaccacccatgactttttgtaaagaccccagtcttctcactgcacactctgcttcaagcacatgtctttgtatcccaattctttttttttttttttaaacatgtttttgtagaggcagggtctccctatgttgcccaggttggtctcgaactcctgacctcaagttatcctcccatctcagctttccaacttgctgggattataggcatgagccaccttgcccagcctcaattctttatttctgtataaactgtgtagtttaggtacagatagtattctttttggttttttccaaaagaaagcatctgcaagcatcgcaaaggattctttttttttttttttttttttttgagacgaagtctcgctctgtcgcccaggctggagtgcaacggtgtgatcttggctcactgcaacctccatcccccaggttcaagagattctcctgcctcagcctccccagtaactgggattacaggcgtctaccaccacgcccagctaatttttgtatttttagtagagacaaggtttcaccatgttggtcaggctggtctggaactcctgacctcaggtgatccacctgccttggcctttcaaagtgctgggattataggcgtgagccacagtgcctggctacataggattcttggtggaaatttttcctttgcacctagaaggtgttacccactagtcttctgaccagttgctgagctgacatgtctattgtgaggcaaattcctttgtagtatgcattcctttgtagtatgcatttcctcctggtactttcaaggtagtatttttgtctttaatgctttttaaaaattacttatttatttatttgtttgcttatttatgtattgacaaggtcttgctctgtcacccaggctggagtgcagtggcacaatcatagctcactgcagcctccacctcctgggctcaagagatcctcccacctcagcctccaaagtagctgggacaacaggtgtgcgccaccacgcctggctaattgtcagtggtctttagttttactgtggtgtgtttgttcttaatttatccttcttaggactcagtgtgcatcttcaatgtgaggacttcattccctagttctggaaatttctcaactattaattaggttttgaggttttccagttttcaccttctgcaattcctattatatgtgtgttagcccttcttggcccttctcattcatatctccaagaatcttagactctcatatattccttgttttcatatctgtgtgctgcatgtcatgaaatttcctcagatatgctttatatttttcttattcccctttgagctgcaactaatttgctatattcgctgagcttctatattatactgcaatgagtattttttgaaggactctttgatttcttttgaaatctacttgttattttaaaataatatttttattatgtcttccactctcttttctatcttaattattttaagtatacttattattatgtaagtatacttattatgtaagtatacttattattatgtagtcttttacaaattgttctaatatctctagatctaagatctcccactgacatagttgcttgcttttttgcgtcattcatgattactttttattgtgagctcatcttcatcggggttaattttcctgtggatctgtgtctgggctgtgaaagtgtccatgcaaagtagcttggaagtaagtttctttcatggctgtatatacatttttctttttttttgagatggagtctcgctctgtcccccagggtggagtgcagtggtgccatctctgctcactgcaacctccacctcccgtgttcaagcgattcttctgcctcagcctcccaagtagctgggaccacaggtgtgtgccaccacgcacggctaatttttgtatttttagtagagacagggtttcaccacgttgaccaggctggccttgaactcctgacctcatgatctgcctaccacggcctcctaaagtgctgggattatgggtgtgagctactacacccagccatggctgtatatacatttttatgttaatttctggatttggagttttagaactattggactgtgtacatttgaatccacacttaactttttcctgccattgcctcaggaggatagaaagcttcactagcacttcttttttttaattttttattatttttttttgagattgagtgttgctctgttgtccaggctggagtgcagtgatgtgatcttggctcatggcaacctccacctcccaagctcaagcaagatccttccacctctgtctcctgagtagctgggactacaggtatgtgccaccactcccagctaatttttgtattttttgtagagatggggttttgccatgttgcccaggctggtcttgaactcctgacctcaaatgatccacctgcctcagcctcccagagtgctgggattacaggcatgagccactacgttggccttgctactacttttttcggatcagctttacacatcccttttgtacagagcagcccttccagccctgcagtttattgaagggggtcggttccagctcgccacctcggggagtccaggactcatatcctggccctgtgttctgccctgattctgaagtttttcccgttctttctagcctaagcccccaaccctgggccttgtggctccaaggtgcctcacttacgttccatgatacagctcctggatctgctcttgaataaaacctcccagtttcaccatctcccttccggtcacaagggtgctctttccggctccaggctctgcaaggcagttgtgctcagagccccagagcaggccctacagcacagatcctgcagacgggcacagcctccacctcccaagaactccaggctctgactcattagtcaacttagtccatagctttctagcaaaaaaaaaaattgtgacgcaggccaactgagacctagaactttttagtcatggaagccagggtcttttggtgcacctggatcactgattcttgacctaggatagtcttgtactctcaggagacatttgacatgtctgcagacatttcttttaagagaaggggtctcactatgtcacccacgctggagtgcagtggtatgatcctagctcactgcagcctgaacctcctgggcttaagcgatcctcctgcctcagcctcttgagtagctggaactccaggtgtgccccgccatacctggctaatacttatattttttgaagagagaggggtcttgctatgttgcccaggctggtctcgaactcctgggctcaagagatcctcccgtctctgcctcccaaagtgctaagattacaagcatgaaccaccgtgccctggagacatttttgatcattgcaattggtggtggtgatgggaaaattgttcctggtgtctagtggatataggccagagatgcagctaaatatcttataatgcacggaatggccctaacaacacagaagtatccaaccccaaacacccacagtgagtcctgaatcccgagggggtgagccctctgtccgctctgggtagagggatagagaagctggctaaggccctatcccagggtattccctgtggggaagcttggagctgaggctgggactggaggaaggatgtctttcatcagatctggaggacgccagatatcctgactgctcccggctggcacagggagcctcatctgagcccacgagccagggtgcatcccacatcccacccgatctgcccacgaggcctcccacccggcccctccctggtgcagccctgcacacacgcgccagccacacgcacgcctgtgtgatgtggtgagcaggccccgtatgatgtggggaacgggcgtgtggtcgttggagcaggccaggccctcctgggggcggtgaggacatatctctggtgccatctttcctgttctgataaataactgatctgtggttgaggcaagaaggtcacctctgcccagggaagctcaggaacaaaccacttgtgaccggtgggaagagcccgggggggcagcgggaagtctgtcttccctggccaccgggctgctgggggcagatttcagaaaagggaagtgctgagctggggcagtgcttcctgtggtcgcggcaggcagggcatcagggcgggcacggcaaatcagaggggtgactgccctagcttggaggggcaaggagctggggtccctggctgggccccatgtgctgccagccttcatgcattgggctgaaggcctgggggggatggaggaacatactagaacaccaacagcactgaagctcccctgcttgggagtgcccctgggctcctctctgcactcagagtgaagtccccctgggcttcgtgatttgctcctcagcctctgcttctctggcacctgctcgtcaagttccctctgcatagggcccccttctcccaccagctctgagcactggggtcggtggagggggcaccccctgccccttcccctctgctaagcccggagcccctggcttggctgctctgggaaccctcttcatccccaaaggaaggcctgagcccaggagcctgtgagatccttcccaggccctggcgcccctctggtgggcagctgtctgtacccctcttctatacttaggggggatctggtgcaggggcttaggagcaagggaggtggccgggcctctgtagttcctggagctcccatttcctcttccactaaactctcagcatcaccacatgacccagactgtgaacccaggggagtgctcggttggggaggggagtggagggaaaccggctccctcctgtcccagccctgagcaccagcactgcggttccagctccctgcaggcacttcctgcctgctctgggaaagcacagatggctgccacgccatcacagccctggggttgagcccagacccccgaaccttgactgtccagccctgccagaccccgtcaggatccacatagacccgatgggttgctctgtctccttggctctggccgagtccatggacaaggagcatggctccatccgccccgctcagctctgtgcagcccacagccctgcctgccccacctgagggttggggctctctggactggtcaggggtgtgtgctgtccctgccaccctgccccagctgaggcctgtacctggcaggggtcgagccagtaaaatcattgtcctgccctaacccatggtgtctaggcagtatgggcagggccagggagggcccatccagcctcgcaccccaccactcaccgtcttgctctctccttttcactccctctgtctcctgaccttgggtcacctcttccctttcttgctctcactcagtcccttctctctgtttttctgtttcttattttgagacaaaatctcactctgttgcccaggctggagtgcagtggcacgatcttggctcactgcaacctccacctcttgggctcaagcgattctcctgcctcagcctcccgagtagctgggattacaggtgtgcgccaccacgcctggctaattttgtatttttagtagagatggggttttgccatgttgaccaggctggtcttgaactcctgacctcaagtaatctgcctgcctcagcctcccaaagtgctgggattacaggcatgagccactgtgcctggcctgtttttctgtttctctatcactttagtaagtccttctagcccccaggaccccccagcccctctctgtatctgcacacatttgtcagtctgtccctccaccactgtccttgtttcctctctcttcctcgtcaccctgccctgacctggggggtttgtgtctctctgtctctctccgcctgtctccatctcccccttatcctcactctctctctgtctgtctctcattttcattctctttcctttcctctttctttttattttatttgtatgggtccatagcaggtgcatatatctacggggtacatgacatactttaatacaggcatgcaatgtgtcatgatccatcagggttaatggggtctccgtccctcaagcatttatcttttctctgtgttacaaacattctcatcatgctcttttaattatttttaaatgtacagtaaattcttggtgactgtcatcaccctgttgtgctattaaatactgaatcttttttttaaaaaaattattttaagttctgggatacatgtgcaggacgtgcagatttgttacataggtcaacgcgtgccatggtggtttgctgcacagatcaacccatcacctgggtattaaggcctgcatgcatcaatcctggatcttagtcattctacctaaccatatttttgcacccgtcgaccattcccgctgccctcccctccctctctttctccccctctctcattctctccccattttcattttctctctctcttctcattctctttcttcctctctctgtctctgcctctgcaatcacccctggtcttcgccctccctgtctctgctccccggagtccctgcacgtggcttgacagtggccttggtaggacccactggggtgtttcttcgtcgcccatgggccctcatgctgttatcagttggaaatgaatcagagattaggaagcggggggagtggtgggggtgttatcgcccagtgcacacggggctctcagctaatctctggcggccctgggttcgagaggaaatgcagttgcaacactgagtccttcttaccgtcactgtcatgtccgcggcgaggctgtgggggacacgggcaagagattggagaggggagagggagaggagagagggcctggcctgagctcctggcaggcgtttgtacaggctcacgtgcacacgtgtgcacacacagcatgtacacctcctggcccttgacacctgagccgtcgccaggccttgcctgtcacccttccattgcctctgcatgcccgcacctgtccacgtcttcccctgccgccccacgtccccagccaccatctctcttcatgggatggcagctctggcctcatccaggctcttagccaacagagtggccatattattattattattttattttattttatttttttgagatggagtcttgctctgtcgcccaggctggagtgcagtggtgcagtgtcagctcactgcaagctccgcctcccaggttcacgccattctcctgcctcagcctcccgagtagctgggactacaggtgcccgccaccacccccggctaattttttgtatttttagtggagatggggtttcactgtgttagccgggatggtctcgatctcctgacctcgtgatctgcccgccttggcctcccaaagtgctgggattacaggcgtgagccaccgtgcccggcccagaatggtcgtattattaaatgaccacatgatcgggctgctttccgaacttcaccttcccacggttctaggaagcagccaccattatcatggtggcctccaggcttgcgtgtctagctcctgtccttcctgccctcacctcccacaccccttggcttcctagcacctgcagttctgcctcgacccctcctcagtgccccggcttttgcaaatgctctcccctctgcctggaaaactctcctccccatgacaactcccatgcctcctatggcactcggctttcctgtccttcatgaaagcatccagggtccccgagtgccaagctgcagcaggtcccttgtctcggggcttccaccctcgaggcgtgagctccccctgtcaccatcctgcctagggattatgggtgtaattcctacttcctgctcacctcctgccagactgtgggcctgatggggcagggaccgagccctccagtctgtctagggcctggccgcaccaggcagtgattgaatgaacagatccataaacacaccgagagacacggatgtacccaggcccatgcacagacacacaaatgcagtcaccagccatgcacggaaactcacattgacagacgctcaacctcacaaacgtgcaaaccaaagttacctagagacgcacgcagtgaccaagacacacacacgcccactgtcttctgtctatgctctgggctcactgcctctcatccagccctgcccctcgggcaggatcccctgcgggtgtgggcctcctgcactgcagccctggccttagctccagggggccaatcccatgttatgggcccccagcaggattctctgggccccagccgtggtcttgccacgtgactacttacaagtggcttttatgctaaatgcacataatagcacattggcataatatcattgccaatactcacaggtaccatggttcacacagggagcatggtgtgaagctcctcttacagggcttgttagaggaaagttccagctcaggcaaaggcttggggtggagcggacaaagctacagtttggccttttcctcagcagcgtcctgcttctagaatcaccactaaagttaacccaggcgaggggttctctcccagcctccaggaggctccagctggaggcaaaccgccggtctgggagaggtacagtggccagggagaggaagggtttcagggtggtgtgggtggtaggggctgaaggcaggggcagcagggcagggcctggaggccagcagcacagagggtccccacctggcttcattttgggggagggggctgggcagggtatctggcggaggaagcaagaaggggtggcctcagagactggcttgcggagatggggctgcattccctgtggaagggagtgggccttcacggcttcaaggccgtttgtcacctaaagcagctacgggcatcttctctcttccctctttctttttagagacagtgtctcactctgtctcccaggctggagtgctggggtgcgatcatagctcaccgcagctgcaaactgccgggctcaagtgatcctcccacctcagcctcctgagtagctgagactacaggtgggcaccaccatgcccagccaatttctgtattttttgtagagatggctgtgttgcccaggctagtctcaaagtcctggccttaagcaattctcctgcctcagcctcttaaagcactggtattagaagagtgagccatggcgccctgcctctcttaaagatggctttaaccatcacttacagcacagctgcatccctccttggcggggtgggggagattctttcccacctctctgagtgtccccatctgggtccttgctcagtgagagccagactttctgctataaccaggccctgaatgagagagaaccagagtcatgtgctgtgcaccaaatgcagtgggaagacacgagggatgcctcggtgaccttcttttcaaacaggagtctttccctggtaacctgcctctgaccttccatcagccagatgttatcttcccaaggcaacagtgttccagaattctttctgaggtggccctggcagcttctgggtccttctattctgatttccagttttctttttccatttatttatttatttatttatttatttatttatttattaattatagggtcttgctttgttgcccaggctggagtgcagtggcacgaacacagctcactgcagcctcaaactcctgggctccagtgatcctcccgccccagcctcctgtgtagctgggactacgggcatgcaccaccatgcctggctaactttttatagagatggggtctcactatgttgcccaagctggtctcaaactagcagactcagtgattctcctgcctcagctttctgagtagctgggaccacaggtgagcaccattatgcctggctaattttttatagagatagggtctcactatgttgcccaagctggcctcagactagtgggatcaagtgatcctcccacctcagcctcctgagtagctggaattacaggcatgtgtcaccatactgggctagtatttgtattttttgtagagacagggtcttgctatgttgcccacgttgtgcttgaactcctgggctcaagcgatcctcccaccttggcctcccaaagtgttgggattacaggcgtgagccactgcacccggctccaggtgcagtggagccggcccaggcctcaccctttctccagacctcacattcccaggctcgttgaagggagcagggtgcttcaggcaaacttggggctcgggtctccaggcacttggggttttctcctcccccggcgctggcagctggcctggcttctctcggctggagatgctgaagactcctcggctggtctgagaagcatgagaacagagctgggaaaactggccgtttttgtggtttgggggtttgatgcaagtttcacaactgatctcccaagaacacggtcggtccggtcagatgcgctccctggccaggggcctgcttccctgctgacgccggtgctgaccgcccgaggcgggggctccactcgccctccccaccccattccccgctttccttctttagggaacagcctggaggtgtggagaagatggctttgttttgggggctttcgtggtttccacctcatccttcagcctggggagagctgacggcctggtacccctcactctcatcctggagtttttctcagacacctctgggcagctgttcttaaagctttcattttgaggggacagtgggccaaggacgtcttttgtagtgataatcttgggccggggctgatgagtgggaagtcttagaaagacctgctctagggctccgggagagatgagggccgccagggaggcacacacctccgtagccagcccactccaggaacccagagctgcctccccggcagacagctgggctggggagggggtcctcaagacctggccctgcctccaagtagcctggcccccggacctatccttccaccctgggaagtcccgagctgcctcaggccagctggggcagaactgaaattggtgacatgtgcctctctggtcccttgactcccgcccccgctccctcacccccagagtcttcctgaaggagcctccagacccagcgaggagccacaggcaatgcccaccctgagtgggagctgctgtcctgccttccacgtggccccagcctagctcgcccttgcgtgaactgggagctgccccacttccggaggttggtgcgtggttctagatcctgtcgtccctccgcttgggggcacaacgggctgggacccatgcacgtttctcagacactccatctctcatctcacagagcaggaggggtctgcaaagggcaggctggtcaggacacagtgtgaggcagggggccccggggaacagagtccaggctccacctctgctgagcaggcagtcctgagtgttgttaccaagtttgggtgagggcctgggaccctgtcacatcacagctggggaaacggccagggctgggactcagtggcgaacagcagaacccaacaggcggccgcacagactcacgaccagggggctcggtcagaggtggggacagagggtgacctggacttgctgagtcaaggagtcaggccagcgctgcggagaatcccacagggctacgcttgggggccaaggagaggcacgtggccaggcacatctgggtggacagaggggttccagccactcacagagccctctcagtcagagccagataagcctgggcaactgagccactcaggcagggagcgggcgggcatctgaggtccccagggagtctgccctcctggtgggcacagctgggcccagatgaggcccacagcattgggactgggcagagacacccagacatggctgctgctgtgggccccaggaaggccccatatttggggtgcatctgccgggtgcctgcgtccccttcccgttccctatccctgtgcccccctcccagcttcctgtttctgttttggggctgcaggaacttcctcttctcatcacggaccaaaatggcttcttggtctcagctgaaggcctggcggggggctggtcaccccagcctgaaggacagccacagagcgaggggggctccgagcctctgggggcggtgacatctgccaaagggtgaactgtggccctttcccaagagactcccacagctcctccgatggagcctgtcatgtgagcacctgcccaggccacggagggcctgggtcctgctggagtgaccctaaacggcccccttgtgcccttcccgcctcacgcaagggacccaaaatatggattgcctggtctccccttcctcctgctccctcccaggcacatggtgcagacacttacgggcaccgtgttggcctatgtgtgtggatgagcaaatacacacacacggggtaggggggtgccctgagcctgtgaccccctgagccggtgacccctgcctgccagggagcagagctgcagattcctggatgccgagggaatagaaggcctggcccggcctgggcagtacatggtgagggtgtgtgtgtgtgtgtgtgtgtgtgtgtgtgtgtctgggtgagtgtgcctctacgcatgtctagggggcaccatccttttcctcccactccccctgcccccttcccctgagcagagctgctcccttaaataaagctgagctgtgccctttggagcccctgggccctcgagggagtgcagggtgacagagtgggctccccttactcctgggactcctcactcagggggagcctgtggtgggtgttgggggagggcgtaggaggtgggcacacgccagggagggcacacaggatggtggcccctgatcccctggagttgtgatgcccacaggaggggtgctttaccaggcttgggcaccccaggaacatcctggccttgggatggggtgtgggggtaaatgggggacggtgctgagaggccgagccccggtctacctccctgcccatccaggggtcccgggatggagttgaggagccagatgcatcctctggggggttgtggcctgggtcaaggtcaggacagcgccagggaaactcctgctaccagctgcccctagccccaggctgccgctgctgtccagaattcacccagcgttcactccatgccaggcaccaacacggacagctcctttaatgcccgatgtccatccttgtcacggacaggtgagtaccctgtggccaaatgggcaggaggttgtggagcctggcacccacactgcagagatgccgaactctggccagcggcctccctccccaaggcccgctccatggggagacagtgaggggaacccacaaagcctggggtcactgggtccccctagctggcacctagcttgtgcccccattagcacagagaggaggcggtaaaacaaacactcccgactgtttaccccaacatctcggggccataattaagcttccttcaatcgggcccttatcagcccggtatcttgagcagcctctgacggggaaacatcccggagcatctaacgaaggaaagttggacgccttttgagactttttaaatcctgaagaataggcctctgttgccagctacccgcctgtggcagcctgcctcatctctggactctgccggctgccccaggggcaggggcaggaccaggcggccccagccctggcaccccagccctgctgggatgagcccccaggccctgcccaccatctggctcctccaattgcagtgtccctgctggccagcggtggggtcctgaaggcaccccctcttctgccctcaatgccccacctcaccctgccagatgccaatatctgccttcggcaggcacccttgccagcctgggccaaacccaggtggtgggtggggctggtgatgaagggtgagctctcattgcccacagccccccatcacctggttctacaagttccccaccaaccaggtccagacctgccactctcagcctctgagctttgctgaagctgttctctccacttgcaaggcttgtccctgctccttcctcctggataatttctgcttatattttaagacttagcttccagatgtggcggttcatgcctgtaatcccagaattttgggaggctgcattgggaggattgctggagcccaggagttcaagactggcctgggcaacatagtgagaccctatctctacaaaaaattaaaaaataagctgggtatggtggtgcatgcctgtagtcctagctactagggaggtggaggtgggaggactgtttgagcccaggggttcaaggctgcagtgagccactgcactccagcctggccaacagagagagactctgtcttttaaaaattaaaagaagacttagtttgagtatcactccctctgggagccatctgtgcattccaggtcaggctcctgtctctcctctgtgcccctccaacttcatggtctccatgccccaactccgtgtgtgtcccttggggggcagaccttgggtatcaggccagccctctaccaggcccagagcagcctctacaagtgctcagcttctgtgtattggagttaagaaagcatgacctggggatacccatgccgcccagcagccgacggtaaacctggagtcctcaccgccatgctctgagggaggttctgttcactccacatcataaaccggaaacagcgctggagcagaggcgacagctgggtgcatggtggctggagagcctaggataccaggcaacaaaccttttctgcaaagggccagatggtaaacattttaggctttgtggaccggacagtcactgctatagcttttcaactgcttttgcagggcaaaatcagccataaatgaatgggtgtggctgtgttccaataaaactttatttatagacactgaaacgtgaatttcatatcattttcatgtgtcatgaaatcttctttagattgttttccaatctggtggcaggctgtatttggcctggggactgtaatgggctgattcctggtgcagggtgagaattaaatatgttttcccacctggttcagggccagcctggtcagtcctccctcagggcccagcagctgctcggaggaggaagcagagtcactccatctccagcccaagtggaggacacaaatgagtgaacaaactcacctactatctaaccaactaaccagttaactaagcccttatctcctggattcagagttacccccgcctcctctctgtttttctgtttttttttttgtttgtttgtttgtttgtttttgaagacggggtctaactgtgttgctgaggctggagtgcagtggcacgatcatggcttactacaccctgagctcatgtgatcctcctgcctcggcctcccagaaaggtgggattacaggcatgagacactgtgcccagtcctgtgggcttctttagacccgactgaccccttgttgtctgacctatctctttgacccctggccaggtatcttttcaccccctcaacctgcccaaggtggtgggaacctcaagagaagcccattgagcgcctgaaagctgccgacgaccactcactactgatgtggtgtggcctggcctacagcctggtacaggctagcagaggagatgtgtacagcctcagggctgtgtgtgatggggaagggggctttgggactgggaggggtgtctggctgcacctggagaaggggagggaatggccaggcagacagaggagacattccaggcagtggaatgtcctagacaaaggtgcggaagcgggagctggcggagtgcggggtccctgtaaatccaggacactaaacgcaaggggcttctcgccttgtagggccaaaagccagggcagagctaagcccaccaggagcaaaggctgtggccctacatccctatcctagcactgacccatgcaactggacctgcctatgtggtatgggtcaggaggacgccaggaggcccccacatccccctcctagattgccgaaacatgaatttcatatgattttcatgtgtcacaaaacactattattcttcagattattttttccaaaaaatctgggcagggcatggatgatgggcaggccggacatgtggccattcctatttccgacctgcatttgggttcttcagcattgccctctctcggtcattcattcactctacaaacactggtccttggtgccaacaacctgccagataaaccccttccaggatgcgaatgagacagacacggtccttgcccttgtggaactgacaatccagcagggatgactgacaggtacagtgccatttcagagcacgagaggtgcccgcaatactatgcatctgggcagtgaccaggggtggcttcaggaaggcctccccgatgaggaaaaagaccagccaaggaagactcagcaggagctgccatgtgatgtcctgggggcaggaggcagctgtttgagggacagaaaggaaccgccacagccaagggaggtgcagagtacggaggtctgtggcaggtgggtggccaggagggcctcacagaattcatggggtggctgcaagcagaagaggctggaaaggctttgggggctgggccaggaacacgatctgattgacttttgcaaggatccctggctgctgttgagaggtggagggcaggacctgcagggcgggaggccggtgctcctgggaggctgccgtgtggataagagtcgggggccaagtctcccgctggagcagcatggaaggctgggccggacgtgggcggtgggcaggccccaggactgctgctcttggcctggctctggcgttggcttagcgtgcagccgcgggggagccgtgtgtgggcacgtccctgtgctgccgcccccgctgccccagagacacagccataggcaggctggctcccctgggcctggctcacacgtggtggaggtgatcagggatgacgaggcgggtcgcagggtggcagggacctacagggccccaaggccagcccgggggacagaggactcccttgccaggtccttgttcattcatcccccccctttgtatggtgagaccactgggagccagacacagccctgccccaggggccatggggaaacgagtgtctgtctctggtccggggccaacctcaaggtgggtgtcctctcctgcagcagggccacgggcaccttccggctccagccccagcccagccaggctctgagggagcctgaggctgcctctcctcctccaggttcctgtttcccgggtggccccaaagacagaagatggtgtgaggttcaagggctcagtcccaggctcggatttcctgggcgtgtcagatttcctgggcgctgtgtggctggtgtctgccagggaggccactgaataacgtgaagaccactgggaaagcatagcagagtgtgcagtggctgagtctgtgtgtgtgtgtgtgtgtgtgtgcgtgcgtgtgtctgtgtgggtgtggggtgtgactcacacaggcctgggcttcatgatgtctcttgggagcaggaaggtctgtgtgagtctgtgtctgtctgtgtgtgcatgtgtgtgtgtacccgtgtgactacaagcatgtgtatgagtgcacacagttggtgcaggtgtacctatgtgtctgtgcacatgtgtgtgcatgtctgtgagcgtgtgtgcatgtggttatgagtgtgtctgtgggtacgcatgtgactgtagtgtgtgtgactgtgtgtgtgcacgtgtgtgtgtgtggacacagccctctctggcctgcactcctggagcctgttttcctgctccacctccctcctcggcaagtgttgactcagggagggataggcagccttggttcaggatttcctggtcaggcagaagtggtgccttgaaaagggaacaatctcgtgctaaagtggacgctgagggtccacacagtgcagtgctctagggtgcccaaggccgagagaccttgtgccttccttgcctgggtttacagtgggggtcccagaaagctttgcccctagggtggcccataggatgtgccctcaggctttttctaaatgcttcctgatctgggctgcccggggtgggggctctggagctggacactcctctgactgctgtggaggcagggacagcacccccacaagaggtaccccaagagaaatgggggcccccaatgtccccaggcactagctgtcccaggttcccttccacagtgggcagctttacccctgcaccgccccatcccccaaagccttaacaaataaaaatgaagctctttgaggctaagagtctattcaagctccaagagctctctgccatgttgggaggagccttctagaagcgctgcttctctcaggggctgggagggctggcctcactgggtacgcctgagagatgcagcatcttagtcggcacccatctgccgcgtccacatctgggctgtaccaaggtcccccagaggcgccactgtccctgagagacgctgagtgagcccagggcccaaggacagcagccacttactgtgcaaatgccggaccttccctgtccccaccacctggattcctcccggggtggccctgggtcttgggtcaggcagggaggctgagtggggtgggcagccagcacagccaccatgtccttgtccccctgccccacaggggctgccttctccagctggaggttcaggcctaatccccaggacaaaacagggatttgcatcctaaaagctgctaatgcgggtgctgctcctctgtcagtgcccgcttatcgtagaggaaagacactgtccctggggcgttgggagccgctggtctcagctggttctagggatgatggagacacagctgggtggcatggagctcagctatccttgagctgggtcagcccaagcaggaaccccaagggggcccccgagaacctctagcccagacccctggactcaggcctaggtgcctgtcccactgtagacaccaccccagccctgcgtgctgccaccaaacctgtcccctgccagtgatgtgggcacccctgaccccttgcacccactgggactcttctcctgcacaaggtccctgtccccactgctgcttctgccctgtcccctccctgctgggtgtgacacccagaaaccgggctgtgggaggcaaacatggagctggcttggagagctttagaccccctttcttgccttggggaccccgggatcctggcataggcctgccctgagtggggaaagacgatgtcagagtccctgggactgcagagaacgcggtgtcctccgaagcatgcctgggtccccctgatcagggtggcagcagggggcagtgcctgggctttgggtgctggcccccaccacgctgagcggccacgagcagggctggccgggccgccattaatgattaacttggggcctgggccttgacctcgtgggcctctgagtaaacaggcctgctggagcctgccgggcccctcatggcctctccaccccctgacctctcctgccctcctggtcctggcctccctcacccacctttgctgctgaggtggagcagtggcaggcggtctagaggcgctggcctttctcacccccaccctggatcagcctaccgctgattcctgcccctggccccagcccattctctttggagcctttgaggtgggcttttcttcttggactggggcttgcccactggggtgtctcaagccctgacctcagccccttgcgtccacactgctggggcttgttgagactggccgcgtggagcatgctgtgtagacagtcaggaccggctgtcagaagacctgtgttctagctccagctctggtctcactggctgtgtgacccctagaccatgccctgtctctctgggcctcagtttccccatctgcacaataaaaaatagagcaggaatcccagggctttctaatcccagaattctagatgccagtctggtttggagtgagactgaggataggaaaaacatatgtccccaccccgccccagaggaccccttcccgaagagtcactggggtggacctccaagttcctggctgcccacactcacttccttcttctggggcagccccttgtgttcccttggaggaccagccctcaagctctcagaccaggggcttcaggcagggcagcccctgcctggggctctggaagtgggtcatatgacctgggcctggccaatgggtgtctgccctgagacttttgctggaaatactgagaaaaaaaaatcattttttcttccctagcaaagcaggagaatgtgagccccatggttatcttgctgggcacaaaggaaaggagagctgaggacccgacacgggttttgacgacggagccccagctgtgcccgaaccggcaccttgtggacttttccatggcaagaaccagtggattccttttctgctcaaaccagtgagagttgggtctcttccctgattcacacattcacacactggactcacaccatgcaggcacagaggctacaaatgcacagttgtcaccgttacacacgcaccgcgaaacatctgtggagaaaatgtgcgtgacaaacagggctggggagggaacccggctggccgcagtgagcaagggtggcagggggtgggagaatgtgggcccagggtgccgacccaagctctctccctgtcacttcacccgccatttgcccatcatccccacgtccagaaccctcagccggccattgtggatgatgggcgaatggcggctgaggtgggcaggctgaagctgattggccagggacagaggtgaatgctcctgtttgcacgtgtgcgtgtgttcacatgcacgctgagctttgcatgcaagaaacatgctgtggcccactcggggagcactttcagtccctccccactgcagaggcctgaagctcagtgagtcggggaggggtctctggtcagtcgggccctcctccaccctgggactgtgtggttcctgggagctcaagggccacctgggtgggggcaacccgaggagaagggactgcctcttctgctccactgtgggatagaaggatcaccagggccttctgcaggagcagagaatccgcctcatttgggcctccccagttctccaaggagtgctggcctcatggggctatactgggggagaggctttgttctggagcccaggctgcctttatgacactgggtagtccagggtcctagatgcagatggcttcaggcatattgcacataccacatgcacacgcagacacgcacacagatgcatatgggcacacgcaggcacagctatcttgtgtgagctctgcggatggaaaaggagaagctttctgtggacagggaacaatggcgacagaggaaccccttggccctcctgggaaggccccaccccacagcttggctcttgccaggccccttgggctctagcctggggaagggctctcagccagcagcaggaatagctggatcaggtgtctggagataaccctggctccctgctgctggctaaaagcccttcccccaaagctctgtcttcccctcctgctcctcttcctctccgtgccttgcttttggactttcaggccacatcacattcctttttcttttcttttctttttttctttctttttttcttttttttgtagagatggggtcttgctatgttgcccaggctgacctccaacccctggcctcaagggatcctcctgcctcagccttctaaagtgctgggatgactctgactctttctctgcttcctcctgtctctgttggtcccagtttctgtctctctaggggggcatcccaggagaggggcaaggttcaggcctcagggcttaagccccttggctgctgggccaggccttcctctttctgctgtctgtcccctgccctgcttccttactctggccagagccgacttgccctttgccctggagctgcggcacctcggggttgggggaactgatggcctcacctcccccaccccctgcagcccctgctcctccccacaggagtctggccagagagttgggccctggggaggccacacagccaggacacatgtcctggccccaggcagaacccttgccctggccacagagccacaccagccaggtcaactctgtcctctgaaatccctggagaccagggcaagccccccccacccactccctggggcagcttcggactcccactcacctccaggttgggaaaactgacccccagcccagggcaggaggcaggatgtggaagggcctctagcagagctgaggtccagccggccatgtcgggggaaggacgaccctgtaccctgtcattcccctcacagtgtgaggccccagggaataacctgccctggcaggggactgagaagcaggagcagtttcccagctctggagcatgctgggtgggagcaggcacggggcgtctctgggggtggggagcagcccctccttgcctaggcagtcactttctgggggccagcacttcccacactctcttttttttttttgagacagagtctcactttgtcacccaggctggagtgcagtggcacgacctcggctcgctgcaacttccacctcctgggttcaagcaattctccagcctcagcctcccaagtagctaggattacaggcgtgtgccaccacacccagctaattttttgtatttttagtagagatgggggttccccatgttggccaggctggtctcgaattcctgttgattctcgaattcctggtgatccacctgccttgacctcccaaagtgctgggattacaggtgtggggcatcacgtccggcacttcccatgctctcagagcattcactgctgctgtccaggtcagagtctgccagtgccctcctccaggaagcccacctgggctggaccagaagaggcaggagcctgaagcagccggccttcctccccaccacacaccgggaccggggcttcccctcgccacactgattaggctggaagtggggggcttccagcttcccacttctggaagaccccacctgcacccagcctgcctggggctcagggctgcattgaaaatgcctgactttccaccccagagtccagggcaaggcacagcttctgataacccctgggctgatgtttgagcaaggcccctgggaaaaagtcctcaggccttactgagcccagtgctgccgctgttgctacagcagacaacctggggcaacgtctccggaagctggagaacgggcaggtggggcagccacaaagagggctccagcggtgtcggctgcctcggtgtgcggttcactgtggctgtgtccacctgctgccttcctctctgggcacttccactgatatctgggaggaggccacctccaggggttgtgagcactcaaatgagacaatgtgggcaagtgcctggcctgctgcttggcgcacactgaaccctcaatgaatgcagccatcagccctgctcaggctggcagggttgtgaggactggaggatccaggtcatctctgcagaccagggcaaggcctactgctggacaaggggaaggcttgggactaaatctctgccttcctggcccccagagtccacaaggcacaaatgtgcacttgcacgccccccccaacacacatacacacacacatacacacacacacatacacatacacacacacacatacacatacacacacacacacacacacacacacatacacacatacatacacatacacacacacacatacacacacacacacctggcttggcttcccattacccagccacctgctggaaaaccaagagctgtctcttgaaaaggatgattaagaaccagccttgactactcaaactgaaactccaaaccctcctctggggtacccagctcctctggagcctgtgggcgaaaagctcttaccatagtggaaaaaatattctgccgaaacggaagtcttcctcaatttagctgagtcattttcttgtggttaaggaagtccgggttacctctggcccttcccctgatgcccatggcctagccagcttgggggaccccagtccacactcccgccctggcagggggcatgcccatcccggcaaacctgcagggcccttgattgtaagtcaccccactcaccccgggctgcttctcaccactgtttcctgtgctgaagtgggagtccagacccccaagaaccaggatccagggtcactgatcaccaggtcaccaggggcagctcctacaggcctggggtctgcctgcgcttcctgtcggggatggtggccccttgaggatagaggcctcctgtggattgacactctgctcctgtgtccccagcttgggcagctcttagcacgaggtcggtatcaggagcccagtctcccagcattcagcagctcacagatcccccaaggagccggtagcttggaatgagttcctagtggatgggcagtggaggggctgggtgccaggccctgcttagatctcagacccagttgggctcatggcaaccagggatggaacctgtttcattctggatcctaggagtctgagcctgcaggccaaggcacctggcccaggtgtggcagagccttgcccagtcggggctctggctggagggaggctggtgctggtgggtgccccaccctggctgcaggtggctgcctcctccccgggagaccttttggaaggtgccagaggctgttgtgggggaaggcggagagatgacggggcgggccacctgagtgccgtggggagagccttgaaggtgccaagtggtgccagttgcaggtggggcgtggaggccagctctgtgggcgctgggtccttcccctgcggccacaccgtgtgccaggaacgagagaccccctggctgtgcgttccaccctggccctccatctgagccctgggctactggggaggcagcaggagcccgggcagacggctcatctgagctcggccttctgtcagctgacaggggtcacgtgctgtctgggcttgcctggggcctgagaaatggggatgcggacagccattgtcagggctgttggggaaattcaaggaatggaagagtcagagggagttgggaggccatgtctcggtgtgtgcgggggcatcgaaagccctgctggatttgggggatcaaaggaccgccacgcatcacttgtggggtctcgggatgatgggggtcaggcctgctctttgctggggaggccagtggctagcaaggtctggggctcagtgaataaggccacgcttgcagccgcccttgtcccagtgcttggagagccaccaggcagactttatctgcatccctggaagtgacctgaagagactgccgggcactagaggggtccatgtgggacccggaacccaaaggatcaggttcaccaaagcctggacttccctggagggcccctgacccgtctcagcggccgtcaggcatccgccagctgggccctgcgggctgtgctgcccggtgactccagagtcctcccacacccacttggactgggtcctcccgtggctctggcagccaaggtttgggaaattaggtgaggggggcctgggacgagggtgaggaaaggaacaatttatgttcaaaagtcatcttgaaattttcaacatatttttttatttttcaaaacaaaagctctaaatgttggggctggggggtggcggtggacctagctttgtgggaagtgagtcagatggccataaaatgtgtttttctgagccgaggggattattttacatcttgtggcatggagacgccaggaggaagccctcctcctggtccctggtggggctgcctgctgctgggcctcagcactgatctctcttcttgagatgggggctcctgcccttccaggacccctcatcagccctctccctccctgacctcacatcccgttcttttaggcaagagtgaggctgggaaggtcgtggcttcatggtggggcctcgtactggctgtgccatgccagagaatctgggtaaagtatgccttggggaccctccccaacccctcgtctgatggataggctgatggcgggaccacctcccagaacagccaccagcatgaaaggagggatttgagaactcatttgcaggccgtcagggctcggcaagtgggtgccctcccacctccaagaacatccttgagtgcaggtgaatgaatgaagggcaaaaggggcaactaggctctttggagacccttcctaaagccagaggcgcaggggtcctcccctaatctccgctatcaacggcatcttccctgggaccacagcggggcagtggtggctcaggggaaaagtcatcttgaaatgttcaacatatttttttatttttcaaaataaaagctctaaatgttggggctgggggttggcggcggacctagctttgtgggaagtgagtcttcccagggaagaggacgctgagtccccacctcagcgaccagagacctcagaggggctagggtcagggactccagatgcccatcaggacaggacctggtggcttcagaggcctcagggtacaggtcccaccacccaaggcagggactgggtgggacccgtagggagggctccgcctggagcctcccatgccctctgcctcgctgggggctgctgtccactgccatgcatatcccctgaaccctgccttccctgggctggagtcacaggccccatgaacagcttggggtccaagagcccacgctgcctgtgaagggagacccctggtagcctgaggccggcagaaatggggaagaaatctggggcccaaaccacactggctgattccagaaaccctccacccttctcttgaagctgcagtaaaggggtctccctgagccatccccactgaccatgggctctgcttcttcctgggaccaaggccaggcacagtggacacccactgttttgcctgtctcagcatccatttctctccttccaaccaacacatggattttccttggagaacctccctcccccacgctcattccttgcagtgtgggtggggctgagcccccaaactgtgtgtgtgtgtgtgtgtgtgttggaagtgtggggtaaggacgtgactcaggactggccaatcagcgtcttctatgctcctggatacagtggctggttcagtgatgagcccatggtccaacagcatccaattctggaatttctaatggaattatttagaaatggaagctctacggccgggcgcagtggctcaagcctgtaatctcagcactttgggaggccaagttgggcggatcacttgaggccaggagttcaaaaccagcctggccaacatgccgaaaccctatctttactaaaaatacaaaaattagcccggcatggtggcacacacttgtaatcacagctactcgggaggctgaggcacgagaatcgcttgaactcaggaggtcgaggttgcagttgagccaagatcgcatcatgcactccagccagggcgagagagtgagaccctgtctcaaaagaaagaaagaaatggaagctttagtccaagttgttgggtgtctgtttggaagccttagttactgggaatccccaacaagtggctgaagccagcgcaaaggatggcaaaagcaggagatggaatgggaaaggactctagatgacataatttgggctgctggatccagccacgcctgaagatgaatcctgattgttttcctcattgtgcccggctctgttcctgaatctccatctagaggcagaatttttggtgagatgtgtcagtgtcgtgtgcccttttctgatcaggccactcgagctgggatcctgtgtgcataagccggttactgagagctagaacctgcgtggggtgaggggcctgtcagggcaaccagcacacagctgggctcaccaactacaggagctggatacgtgggtgagaatgggagtcaggtagctccctgcaaaggcctgtcctcgggggtgagtttgggagaagacttcatgggaagtagctcatgattttccaattattaaacctagaaaaagaaccagcagaacattctctttgccttcatctttctgtctttccaatgggtaccttgacacgtccagggcactgagctgtggagaaccggttaattttgtcagatgtcagccttcctgacactggaatgtaagctcccgatggcagaactcctgcaaaaagtggctcactgctgtgtctgcggcttaggagagctctcggcactcagtgaatacttggtgaatgaggaaaaggcgtgatgctgtcactctctttctcgaaacactcaaatgccttcctattgcagctaaaatatataaaagctatactttttgctctgccctctaagtagagtgactgtgtcatttgttgaacaagcaggggcattttttttgcaggtcaaagggaatgctaccaattaggctggaacaatgggagcaagccagaattattccaggcaaagtgggatgcatgccttccccagatccaaggccccccgggatgctggtttctgtcccaggcgtcagcctcattttctgccctccgagtcacgggccacaccgaccctccatcagaacttcgcactgtctgtttctctatctggagaagtcctttgagtggctcagtcttttctggcacctcggtttccactgcacaccacctactcaaagaacctacccaaagaactcttttctgacacccatcctcacccaggcagcctctaccaataggctgtgtttcctgttcctcattgccctggactctatgcaggcaggcagggagtgagcactgaatttcagggcacagctcccaagcttctgtcatcctccgagtaggtgcttgtgtgcccagcacgtgtcttcaaagggaaagtgaagtgaagccagtgtcagcgcagaagtggggtggaaggggaggaaagacaaaggaaaggcaagaagaaatgaagcctgtggcagagaggccaagtcacggctctatgcacagcttcaaaaccagtgagtccactccagaaatcagatgcactttgacctcaatcactgcggcacctcttttttttgttttgttttgcactcttgtcgcccaggctggagtgcaatagagccatctcggctcactgcaacccctgcctccggagttcaagtgattctcccgccttagccccccaagaagctgggattccaagtgcctgccaccacacccggctaatttttgtatttttagtacagagggggtttcgccatgctgttcaggctggtcttgaactccaggactcaggtgatccaccctcctcggcctcccaaagtgctgggattacaggcatgagccaccacacccggcctggggcacctcttttaagatgtgtttggaagcggcatttgaatgcagattccccctgccccgccccatggctggaattcctgtagacacatgcaggaattgtgcagccacagaggccaccacatacgttcctcattttcccgatttcctctgtccttgctgctattggggctctgtaacattgtcccagctgtgtttgtcatttggctctggctttccatgcacacctgtgggtgtttgtttatagaatgcagacaccacccctttggctgccacgagggactggccctggggactggcctccaggatccccagacagatttgcttctctgccttctaatttttttttcttttcaagacaggatcttgctctgttgcccaggctcactgcaacctctgcctcctgggctgaaacaatcctccaacctcagcctcccaagtagctgggactacaggcatgcaccaccacgcccagctaatttttgtatttttagtagagacaggatttcaccatgttgcccaggctggtcttgaactcctcgcctcaagtgatccgcccacctcagcctcccaaagtgtggggattgcagaggtaagccaccgcacccggccttctctgccttctttaaagcaaaaggactggagtagcagggatccctcagggtcctggctgaaaccaaactcaaccctgatgattccaataaagatccctttatttaaccagggggccagtttatggaggtgtgagcaggggtaagggaatgaggatgggatgctgaggccccagaagctggccatggcaaccatcatcaccacctatcaggctgaaggggcgaggggaggaatcgatgctactggatcctcgtggagggcggagaacaggccacctgacaggggttgtagtcttgcgggtgcagatggggcatggacgcagaagagagcagagaagaaacaccgcagcctctctctccttcctccgtctgatttcctgctggtgccgcccattggccaaacccaacaggaagccagacggcctgggaggccctgagtgcggcccacacagagcagactccagggcccagggcaggatgtagaggggatgggggcagaaaaccagcacaggcgggtaaggcaaccgggaacaagtctatgctcagtcttggtgcaaatcctccttttctgtggctccatccacctctggccacagagcttcctcactgggctgacagaggtccttttgctggttacaacccatgctccacacaccagcagagtgatcttaataagcaaacctggcctggtacggtggctaaggccagtcatcccagcactgtgggaggctgaggggagtggatcgtttgagcccaggagtttgagaccagcttgggaagcacagcaagactccgtctctacaaaaaattaaaaagttagctgggtatggttggacatgcctgtagtctcagctacttgggaggctgaggcaagaggatagcctgggcatggaaggtcaaggctgcaatgagctatgatcacaccactgcactctagcctgggcaacagagtaagaccctgtctcaacaacaacaacaacaacaacaaacaaacagaaagcaaacctgtcctccatgttctgtatggctcctgttgctcttgggatattgactaaatctgaacccctgcgtgtgagagcctgtgtagtctgacccagctgaccctctgacctcgcctcttgtcctccacctcccttacgccccactccctgctctgtgcactgtggccacactggatatttttcaggacctaagaatgtcatgctccttctcaattctgagttttgtatatgctgttccctctgctgggattcttttgctccaaccccagctacttataaataccacttcagatcttcagatctcagcttaagaaaacacacccctaagagtgacttccctgagtctacaaagcaggtgaggactctgggcagacactctcaccacccctgaatttccttacttcacaatatgtgtcacaactgcaattagctaataaattgtgtcactctctgtttactgtctgtctccccagagaaactaggagctccccaagatcctggtctgtctgtctgtttcactgctgtgttcacagcatagtgcctggcacataggaggcactccaccaacacttgatgaatgaatgaaaggaggacttccagttcccagtacaggcacacttgattatttgggcttatcctcttgctgtaaacagctggattaaaaaaaattaaaatgtattaaaaggaaggaaggggaccaccaggccaaaattgaggagaaaaggaatccagacaggtgagcaagagaagaagccactttttccctgggacacattctgcaccccaaaaatgcaaatcttgttttgatagcttcatggaatgaaagagacagaaatcagactttggggctcatacaaggtggggcatataataggacacccatcccatgttgatgcagaacttcaaagggctacaccctcgggataaaggtgaaccagaagtaaaccagaagtaaaccagccctcatatgaacttccaatctaagttctcatctcctggatgggatagggaccactaaaccttaatagttgattaaggtgtccctggaatgtcagtattccttggtgtttggcaggagaaaatgaaaatgatctccagtggaaggcacctttgtcctaaatctttcttataaacgatttatcaaaacaatgaccagcacatagtcaaagataatcagacacacacacaagacactgtgagtaaaaattggaagaactgatacacagacttcaaattattgactataaagtaattgtgcctatgatgtttaaagaaataagacatgcttaaaaataactgcagaaatgggaatctataaaaagtgaaatatcagatctgcaaaagaatcaagtaggatctctagaaatgaaaactacaataaccaagaccaagaacatcaatggacaggtttaacagattaaacacagctgagaagagaattagtaaactagaaaggatgtcagaagaaattatcacaattgtagtacataaagacaaaaagaaaatacaaaagagaagatatgagataaagaataagacctaatatatttcatattgtccttgaaggtgaggagagaggaaatggagtggagccattgttttaaggatgaatatgggtaaacattttctggaactgatacatgactgtgtgagaagaaaaactgagtcattgtgccttggtgacaatcaatccatctcccatgtttcagacaacctagaattcaaaacatactaatgggagattctggacctagtctactcttggtcaaaggccacagtgttgtacaataccaagtaaaatatagcaaatgacacatgaaaacaagatcaggagtgagaaatcaactcttgcctgtctcctgcctctgtggttcacccctgccttcttaggaactatttgggccactctgagatgaccacagctgtgtcctcctgttccttcttccctcccatgggccttgctgaccagcactaggagatagcaagacaacattccacaggcaactgggggtccagtggcatgagtgggtgggtgaggaatgcctctctcccaccctgattcagtgctgatgctgatatcttcctcctagacactgttcctcttctgtccaccgacctttgtctccccattctgtgcctgggcccttaagggtgcttggtggagactcattcactagctgactgatatgaattggtccaaaggagctttgtccctcgcttcccagcacaccagcatcacctgggacctggctgtcaaagacctaggagctgggctccaggggcaggcagggtattacccaaccctgggtcctaccatcctctacctcccagccttgtgctttcttggacaggcgagtgatctggctggcaggtgggtagcttgtttgtgactcacgctccccaccttggtggccaggtggcctggtccctggcctcctcatggtgactcgtcctggaatcaggttcctgcagttgctctgttctggagggacaccattcatcatcttgcctctgggaatctcggcacgcctctcagacatgctcaaacagagaggctgccaaacctgtgccgggtcacacagcaggtgtgtgatgaggccagggcgcacacacagtcccacacccccagtgggcgggaaggcaggcccagcccttgtgtaaccagcgtcagggcctgggcactgtgagcagcttcatggtggagctcagggaggccctggtcccacccttgtcctcaggcatgtgccagattcccccacccccagcagcaggtccctccaggcccctgtgctgggcaggacaccagtcccagggcaaaagcagagaggggtggccaagtggtggttgatctctcagcccctaatgagcaaagcctggggtgtcatgtggtctcccagatctggctctgcaatgtctcagacatgccgttcgattttgaaattctcaaagatgttccaaacagcatgcagttgatttaattttttaaattgaaaactaaaggaaattgagttgaagaatgttgagtggaggcagtggcgggaggtgtgatggaattgagccaatcatgagggcattggggaaacaggagcatttcactcccctgggtggatttgggggtacagagggttaaactaccccactggatggggagtctaggagctcaggtgccgctcctgcctgtgttccagccctggtcttatcactgcttccggtgagaagggtccctgaggggcctaggctctatggcactgggcacctggctggggcatctcctaggatgcctggctcctgggtgagcggctgggaccctgaggagtctgatgcttcccagggaggcagaggaacccagagcaggctgctgtccctccagcgtggctcacgcaccgcccccaggcagcgctgccccatatagcaacatcactgcctcactcaagatgctcacctcacctctgacacatttcaggcttggagccatcgtccccacctcccctcggctcaggggcctggcctgtgactcatgcctccacctctcccagacaagattgctccttgaacaaaggagcacaggccttggtgaacttgggaattgcacttgaggggaccctgagcccctgggtctgacccctccagccctgcatcggccttgagatcacatgcaggtggcacgtggctgcacccgcaccagcacccccacatcgcccctctccccggttgctctgggagtcacccacaccccagcctctcctctgtcctttctgctgccctgcaccgagcccagctgatctgcagggtgaagaagccaatgatttaaggcctcccagcccctcttcataattgtggccctcctttgccttggcaagtggaatccaacagcttcctgtgcttgaacagggagacgaaggggcccaagagctgcctgccttccttgcctgaggagtttgcttattaacttgaattaccctcgtggtagcattcctggcagggcagggaagagcagggttggtttctagaaccttttcctgttggcggccccggcgctagggaagcttggctgaggcctcctcctacctgccttcttgcccctcctccaggacaccccaggaccccagaagcttccctggttgttggaagccctgcctgggtggctctcctgcagggctcacgctgacctcctgggcccgagctgggttgggcaaatggaaaccagctgtgatgccaagtgctgagatgacacagttgagaagtgagggggcaagggagcaggatgtgtcccccacccctgacacacacagcacatgtctctggctcccttctcaccagcaaggggaaggcaggacccccaccctcacccctttacttgctgaggtcacagccttccaaacagaagttaactgggaggcccttggggccgaggactctctcagtacctggggaggctgccaccccagtgagaatacttgttctctcttgaactccccatgggtcgtcacctgggattctgcacttgtatgaaggacattaaaacaaatcttgtagagatgggggtctggctatgctgcccagtcttatctcaaactcctggcttcaagccatcctcccacttcggcctcccaaagcgctgggattacaggcatgagccactgcgcctggcccacgaagagcattttacttcgacaagcacacggggcacctgtgcctgctcatctgagtgtcgtacaggctttgaccactgtgcttagccttcaaagtcactggcaagggggctctgcccccagaatgagctcattaagtgttttctaagcaaatgaaaggcatcctttgtgggggggagggggtgtggaaatctaagcaacattaaaatgacttcagttgtttggttatttggaacaagcattttgccctaaattcttaagaaggctgtctccttccactgcgtttttcagggaccaaggtgtgccctagcctcccactctgccttctgccccagcacgtgggaatcattagctggagccaagtgtctcataagctttccctgtttatctttcacaactccatgacatgctacttgttttgcatacattttgcataaaaggaaactgaagctcggagaaactgacagactcagtgcggggccacccagtcagcaggaggcaaggccaggatttggtttgatgccaggatggcacggccctcttcccatgggccatcctcatcacgggatgggagaaacgggaaacgcctccttgtcacccgtgaacaaactgctttgctccagaaaccgactcagcacacacctcgagtgtgcactctgtcagggtgcccgggcttcacttacgtgtccggtacgagactgaaggcccactgtgagccagggttctgtagccttcagctccatgcccagtggtcctggctccaggcaagtagcacttgtgatgctgaatgaggcatatatttcagcatgacagaccacagtgccttcagattgttccgggataaatcctttgtcctgtggcctcctgggctaaggccaattaaacagctgccaggtagggcttattccctataaatcagtgggaatgtggccacatgaattttaaatatcagattaaaatcaaattagtgggaaaatttggaacaaattgccttcaagtacagtgaatgagtctatttttaaaacactgccgcaccaggcaaaagagtgaagcaaacacacatttcctaacagcgagtagacaccgtgctgggagtgatctgtcatgcttagtcacggtaattgctctagcaaaactcaggaatcaaataaaacgtgtttgcaaattgtaaatcgctccaggaggctacttcagacgggtcctaacctgatgctgaaggtcacggcggctccctttggagcagacacccagccctgacgcccccttgacccatccccaccccctttctctgagcaggggttgagccggctgagaccattgcccaacatgtgcacgggaaaggccgctgtaaatcagccacatttccgcatctgcgggagggcatggcattcttggggggtgctggggagggtgctctggttggctggagggaggtgagggagtctccgaggccaccatggccgaggcagagaagaaatggcggcggtggctcagggaagagaggctgtgtttctggtgaaaggttgggctgccatttggctgaagaaaagatcttcagatccaagagggcttgggacaggcggtgagggctccctcaagccccgtccgggtccctgtgtgacatgccctggctctaggccaccacatttggtccctagcctccccaccctcaggctgtagtccctcaataacaaccttgccagtcgtcctagagtggagataagaggagagacatgaagccttgaaatagcttttaaagcagaaatgtggccgttctcgttcccccgtgctcacctgcggctcctgcagcttgggggcagacagggctgcttctcccctaccctgtcctctcttttggaaatcttacctcctccccgcacagtctcctgcagagcatgactgtctctctggggcctggccagacctctgattctggtgataaactaatcacatgaaggcagggaagattatctaggaccggatgggttacctttcttaggattcttgaatgttaaaagtaacttcaggggccgggtgctgtggctcatgcctgtaatcccagtgctttgggaagccgaagagagagggtcgcttgagcccaggagttccagaccagcctgggcaacaaagtgaaatcccttctctacaaaaatatttgaaaattagcctggtgtagtggaatgtgcctatagtcccagctacttgacctcttgagtccaggaggtggaggttgtactcccgcctgggcaacagagagagaccctgactcaaaagaacaaaacaggccagtcatggtggctcacgcctgtaatcccaacactctgggaggcccaggagggtggatcacctgaagtcaggggttcgagaccagcctggccaacatggtgaaacccctgtctctactaaaaatacaaaaagtacctgggtgtggtggtgtgtgcctgtaatcccagctactcaggaggccaaggcaggagaatcacttgaacccgggaggtggaggttgcagtgagctgagaatgcaccattgcattccagcccgggcgacaagagtgaaatcccatctcaaaaaaaaaaaaaaaaaagccaggcgtgttggctcacacctgtaatcccagcacttttggaggccaaggtaggcgaatcactagaggtcaggagttcgaggccagcctagccaacatggtgaaaccccatcgctactaaaaatataaaaaaaaaaatttagccaggcttggtggtgcatgcttgtaatctcagctacttaggaggctgaggcaggagaatcacttgaatctgggaagcagaggttgcagtgagctgaaattgcgccactgcactccagcctgggcaacagagtgagactttgtcaaacaaaaccaaacaacaaagtaactgtagaagctgcaactcagtgggccaccacgggggagccttatttactgtgctcttgcgttgcctctgacaatggtgcggcttgcttggcggaccttgggccaacccaatggacccttggatagaaaggagagggtgaggatgtcttgtaaagaaggagagagatccttgcattcaaacacgtatgttcaagatctgcatagccagacactgaaaatctgctgcggccaagttcagtaggaggccaagacaggcaggaaggaccccaggagtggtcatttgatttggctttaggggctggtgtgaccttgaggagaagagtttccagggaggataaaggtggaggatgaggatgaggggacagtgaggatgagtgtcagaaaatggctctctggctatgtgacaaccacaaaggatgtttcttaaacaagctagtttcccaccccagcttgatggctgcaggagaactacgtctttaagtcgggtgagcctgcagacaagtctgaaaaacggggctgctatagaagagtctcacttcttggctctgcctagaaaaggctttgaattcgtagaggattctttgcctgtcgccctggtccagcctcttctgggcccctcgaggtagctgggcagtgtgaaccctgtgccccgctgccccagaaatcatgctggcttttgagagctcagctggtcttgctcaaagtgtctaccactttgcattctgttttttcttatttttgagacagggtcttgctctgttgtccaggctggagtacagtggtgtgatctacagcctccaactcctaggctcaaacgatcctcccacctcagcctcccgagtagctgagactacaagcatgtgacaccacacttggataatgtttttggagacaaagggtctcactatgttgcccagactgttcttgaactcctgggctcaagcaatcctcccacctcagtctctcaaagtgctggaattacaggtatgaaccactgcacccagcctttgcattctaaggggagtttctggacttcaggcctactggagttccccaacactgtcttctgctattgtcaagcacaggcagcggatgtgggcacagcaaatggagagaaagggtgtctatgccagccaaacccggagaggcctgttcctagtgggtggggccagaaggctagaaaaatataaataaaaacaaaccgaagggaagcaaagctcttgggtgccagaacggggctggccagggctgcagctgtctgagtaatgggttccacatttgtctggcttggtctgcagccaccaggatccagggtgcactgtgggccttgcaagggctggaggggacagtgcagctgcagctggacctagcatacccttacggcggccccatccccggccgccacaacagggtggagatgtcgctgcgagcttccacttcggcaccccagcttccctcccctcacagccccacccctgcctggggctcctgggttcccccggccaacacagattgttcgtgttattaatgccgttttcccagagattccatctggctttttaattgctctgggatggggctaggatgctttgatagtgaatcggtatcttccctgggcctcagcttacgtcaaacactccatcggcagagaggggcgtgggggagggggagaggtggggttgtccagagagaagagatagcaagagtctttcacagaatcaagaaagctttcaaaggtgctagtgggttagttttatctaaagaaaggaaaaagaggcctggcagggtggctcacgcttgtaatcccagcactttgggaggctgaggagggaagatcacttgaggccggcaattctgaaccagcctgggaaacacagtgagacccccacctctacgaaaaataaaattaatcccagcagctacttaaaggctgagtaggaggctgaggcacgaggattgtatgagttcaggagtttgaggttgtgggagtggtgactgcaccactgtacaccatcctgggtgacaaagtgagaccctgtctctaaaaaaagaaaagaacagaaaagccttcccgtcctcactagtataggaaagaaacagctggaatatcaacaccatctaggcaaggactctgccccatgcctggagaaggcctgtgggtgccttggaggcccctcttggctaaacaaagtcaggggtttctgctatcccttgtccttccccatgagtggccccttcccctcctgtgagaccagcagctcctggaggaggcctggcaggttcctgcctgggaaggagcaggtgggagagctgggaggggcagacactcctcaccaggcccagtggctcatcgcaggtgtcagggccaaaccccacgttcacagattcccaggagatccaggagataacagtaatatccgtgacagcactaagccatcaggacgcatctggcagcagaggagatgcctccctcccttctacccttgccctttccttgaaggccagctaaccctgaacagcgctgtcacgggacacagggctcaggagtggcgcagcaaggggggcgaggtccctgcagtcaggtgctacatgtcaaggggagatcgatcagggcaaaggagaagcatccaggcatcttgggactggggccagcaggaggccaccctccccaggtatttcatcaaagctgctgcctccataaagccctccctggtggaccctgttcacactctgagatccccttcattgcacttggcaaccttaaaccacagcttagggcctcaagggtgtgagctccccaagagccagagcagagtcggcttgttcccagcccagtgccccatctttggcgcaggccctggcatacagtaggcatctgataaatacttgaggtgtgttcagtgctgggctcttggaatggttcttcctgaaggctgtagtcaggaggggaactgtgaggaaccctgcaggaagcggtgggtggccaagggtgactctgttcccgggaagcccctacagctggacacggggtacatgctgggcaggttcaccccatgccgcccaaaagaccttcctcccctctactttggccccccccgggggcctcgccctcctcatccctttcctggggctggatgtgattggatccttcttgtccctaacaaagcccaccctggaactcaggaccaggaggaggactcggggtaggagggatcccttccgggagccatcagctttaaaagaggaagcccctagcgggctggcacagcagagaggaggggaaggagtgagggcaggagggtcgccccaccccctcccgtcctaggacctgttctggggggaaagggggaagccagggatcagccccctcaaacaagaaaaactggaattagcactgaactcagagggtttgctggggcttagcaagctgcgacctgccccaggcctcggggcacgcggcggggctctgcctcctctgttcccagggtggcggggcaggcgccgcctcctcactgggctcgtggcctctcctctgccaagggcggccgtgggtgaggaggcggccagacacaggacagagtggggggccggaaggggtgccagctaaccacgcaggcaggtaaagctaagcttccagagtgtaaaaggaatgtgtaatttctcgaaaatgccccagcccgcattggtacacacagtaagccactcagtgaacattctctcggtacagagttaaaaaaaaaagaaaagtgcaatttatcttttaccctccgtgagggtaaaatctgaaaagcaccatcagcctcctgggcctctttctcccgggccttgttagttcagggataagggctgccctcccttgcttggctgtcactgctgctaagggggtgccggagtgcctgaccttacagggtgctcattggagttgggggcacaccagcactcagtcccctgctgggtctgggatgaatgcagtggggagtgtggatgctgggtgggttcttgaacagccagtgtgtggggcaggaccagacccctgttgcaggcctgcctcagccccctttcttgtgagggctggggctgggcaggtgtggagggctggatggaggggtctctctcttcaggctgccttcgggcctcgcaggggtagggtgtagccacatggtctagggaaagaggagagggttggagggtcctaccactggaggcctcttcctgctggccgagggtcctgctggaatctggagctgcggtgtgtgtgagtggccagggctgcagctgtaggtgatttgcaaggaagtctgcacaaagggctccttgagcctagggctgcttagccaggcctacccctcaggcagaggactccctctcctcctccccggggcagataagaagcctcgccaaggcctcagcccagtaaccccttcagccccctcccctgaccccaagagactgccttcaggctctggacatactccatttggagccttgtcctctgctatttatttgtcttgcctgggggaagtaagtcacccccttagggtaagaggggctcaggatggatggagagctcatgaaagtcaggattgccgccagggaaaatgctgtattatttacaaatgtgacctggcccacagacaaccttggaagtagcttctttctggttttaaaaagacaccgacattgactttgatatgtttatattatagatataatacataaaacatctagagtgagactctacgttctccccaaaagaagagaaccaagccgtccttccctgctcccagccccagtgatgcgttggcgggaggccacctcccttcccgaccaggagccagggcctctgggggacaagccttgtgggcagcccaggccggaggggctggggaaagctgagggcaaaggagaacccccctcacctcattggtcccccaggatcaaaagtaatcccaaaaccaaaaggaaagggagtctcagacccttcccccagctgccgacggagagtctcattttggcaagtatccgagcaaaaccaaaacaaaacaaaaaccaaataaaatggtggtttagcagagacgcgcacattcacattgcacaaggcactgctggggcacagaggccagatacaagtgttgatatcggctgataaagcaaaatatttggaaagcttgtcataactccggtccctctgggatggactgatcgtgcttcgtgttcctaggcaatgctgaaggcatacagtacaaacaaggctgagggtcccagtggcccttcaccccccatgcccgccccacagccagatctctaggtctccctctcccaccaggggtatacatcctcagagctgacccacgacctagctttctggtgtgactcggggtgggggctcccactggtcacctggtgacccccatcgcagtgagttccgccccaaggggaagcccagcctatagcaggctggggtggggtgtgtgcggagggaggtgggagaggcgtggaactagagaccctccaccttcatgtagaactaggggaacaaccttaggttccaagccccaagtccctatgtttccacccctttctaaggacaggcgtggaggagcggctggggctggcgggcttgtcgggatctcagctccctgagccctcctcctgccacgggcctgctcccctccttctctcatgggggtctgctgtagcctcgggaaggaggcaggaaacctccaaataaaatgacaaggcacgatttgctccccctactcagtaggcattggagcggtgagtttgcatttccaaggcacaaggttatcctaaatactagagttgccgggctcccagctcagccccaagaattctcccctcctcgcagggagaagccaccgcctggccccctcatcttagacgcaccaagtccggcgcagaggaagggaggggacacgcggagcaggccaggctttcaggaggcaccggaatctcctagtcctggctcgcacggctcgggcaagcctcgagatccggcgaccccaaaccactccctgggtccccgccggaggctggcccagggcggtcccacagccgcgcgcctcacgcgcagttgcccatggccttgaccaaggagctctctggcagctggcggaagatgccccgcagcgtgtccagttcgcggctcagctgttccacccgcttgcgcaggcggtcattgtcactggtcagctccagcaccttctgctgcgtctccacgttgcgctgcttggccttgtcgcggctcttgcgcaccgcgatgttgttgcgctcgcgccgcacccggtactcgttgctgttcttgtccaccgacttcttggccttgcccgcgccgctgccgccactcgcgcggaggtcggggtgcgcggcgcccagccccttgagcgcgctgccagggcccggcaggccggcggcaccgagcgcgggcgcggggtgcgggctgggcacgggcgtgggcggcggcgtggggtgaccgggctgcaggtgcatggtggtctggccgcagtgcgcgatctggaactgcaggtgcggggcggccaggtgcgcgggcggcgggtgcgggtgcgggtgcgagggcggcggcggcggcggcggctggtaagggaagaggccggccagcgccagctgcttggcttcatcctcctcgcggggctcctgcttgatcaccagcggccgcagcgccggcgccccgacgcgctcgtacaggggctccagcctgccgtccaggtagccggcggccgcgcagccgtagccgggcgggggcccgtgcgctcccccgggcatgacggcgccgccggggcccgcgggcgcgcccgggtagtcaaagtcgccgccgccgccgccgcccgtggggcccacggccgccttggccttctcctgctgccggctgtgctggaacaggtcggccaggaactcgtcgttgaaggcggccgggtcgatgtaggcgctgatgtcgatggacgtctcgtgctcgcagatgccgcccagcggctccggggcggcaggtggggcgggaggctgcgcggggcccgcgccccggggaaagccgaaggcggcgctgctgggcgcgtgcggggggctctgcaggtggctgctcatcgggggccgcggctccgcctcgtagaagtcggccgactccatgggggagttagagttctcccggcatggcgagcctcggcggcctccagcctgcgcggggcgtcgccgccgcccacccggagaccctgctcgcccgcgcccgcgcacctccgggtcgcgaatggcccggcccgcgccggcccagcttttatacccggcaggccgcgtcgccccctagagtccgaggcggcctctgtccccgggctgcggcggcgcggcgcctgctgggtcctagcgcgcggccggcatggggcggcgaaccagcgcggcacagcgccgcgctccccaggcaggccgcggcgcaacgcccaccgcctccagcgcgcccagcagagccgcggcgctcgctccaagctccgcccccggcccggccgtcgcccccgcgcccacgtggtcggtagcgggggccccctcctcctgcctgccctaggcgcccgtatccagccacggccgggagcccaggagtatcccgaggctgcacggggtaggggtggggggcggagggcgagtcttggtcttgagctgctggggcgcggattctctttcaaagccagaaccaggcctgtcccggacccgcgtcccggggaggctgcagcgcagagcagcggggctggggccggtggggggccgtttgggacgcgcggagaggtcctgagcgcggtggctctgcgtctcctagctctgatctccaggctacccctgtgattccgcgcagaggtacctctcggaggacgccggggtcccatgggcggcgccgcgcagggcgctaggaccccgcggggagcggaggcggcctcggcccgggagcctggaggacctggccggtcgatccgcccgggctggaaaactttctttataattacttctccaggtcggagcgcgcggcttgctaggcgcgcggggccggcgctgttacccggcgtggagtcgccgattttttttcctgcgggaccgcggggccccccagactagcggagctggacgccggggcgagcacggggaggggcgcaccgagggaggagacaaacttaactctggggccgggattccgaggcgggggccgcagccctcgaggcccgaagccaccgcttcctcccccgcctccccattcaggtgggcgccaacggcgggagcgagggtgtccaggccgccgggctgccaggtccgagcacgcacagggagaactctgcccagtggttcgccgggcgctgtagtccccgggatcctagggaccgaggcggccaggccctggggccccttgagtgcggcagctaatgctctcaccgcggcgggggaaggagcttgccaccgagacccccagccacgtgcgtccctcgcattctttaccggggccggggtggcggctacggaccgtcagctgggcccagatggagtcttgggagccctcaagtgtctcctgtccttgcccgcgccgcccctcgccactggcgctgaggcctgacgccgcctgcgtcccggctagaggcgcgcttgcctacaggtgagggaagacccccttcaccgacagtggccttaggcctggcaaggcgccacgacccgcccaggagccccggagggggcacagctaaaaacaccgctggagagccccgagcttccacgacgatcgcagtaaagaagcagtttcatctgggcaacgcacactgcgctttaatcaagttcctattcaacatagtcccagtgattaatagcccaactgcttcgttttcggtccagagctcataaacaagatatttttagcttgacgcttttggacgggagggagtaaaaaccagatacgttaaataaatatcccgatgtgagccggagagctgcttgctgagccaaatgcaggacccattcatatagcattcacctgtggagggagacctggacggaaatcaaaaagcaccaagagcgatttgcgtttttttctgcggtgctaaaactaatggcttttcctacctaggaacaaagaaacgccactgtacatgcacggttcccggcctgtggagttgtgggaggaaggcgatgtctggccttttttgcacagctgctgttgcctgcccagagatcgggaactctgccccgtaggactggaagaaacctcagtaatgggaataagactttgtccaatagggggctgatgaatgtgtgggggcgacaatggcaaggagtgggactcccggcccggggttcgccaaccccaggggccacaggtcctcctacaattgaaccagaattcacccacccgggcctgccctgtgcagggtgccgagagcccagggatgcatgagagggtggctcctgcctctgggaactgggacagtgggagagacggataagttgtcacacagaggctgctgggaggaaggaggagacagaaggagtaggggatgggacttcattcattcatcaaatgcacacgaggcacaaatgggaatcaagggtggatgtgctgtgatgaagagaagtcctgccctgaacaaggtggcgctgtggaggaggcagagatcagatttgtctgcggaggtgttatggactgaactgtgtccctgccccaaattcctatgttgaaggcctaacccccatgtgactgtatttggagataaggcttttaggaagtcattaaagtgagatgatgtcatatgggtagggtcctaatttgataggattggtggccttatcagaagaacaatgtcatgggcatgcacagaaaggaggtggccgtctgcaagcagggaagaggcccctcaccagaacctgagggtgctggcagcttggctttggccttgggcatccagcctccagaaccatgagaaataaatgtttatggtaggtctatgatggcagcctgcttggactgaaccggcggtgagacagggcttcatgcaggagcagacctttgagctgggccttgaaagttgagcaggaatttgctggaaggataagggaggaaggctcttctaggaggagggaatggtaagtgcaaaggtggagagcctgccagtgcatgtgttctggtaacaaagaacgagatggttggccggctggagagtggggtgagggagggtggggcctagataaggctggatccgcagacagggctgggctgatggccaaggccactgcaggtgaagggggaacccttatctcccaggcttttgacctccagattttagcaggggagcttcgttgtcggatttgggttcctgagaatctactctggccaagacggagagggggtgttgaccagatgggaaaggatggagacttgtattgccccagtaatgagcgggcagggtagattagaacaagatgtcaggacttgggggctgaatgccaggcttctggctgggattaccaccccctgacacatataatgcccaggaaattggaggcccctctccaagcccccaggaggccactggggactcattccaggatactcacctgcctgctttgtggttttggaggggaagaccttggagcagttgcgaagatccatctaccatgttctggtttttccttggaagcctaaaagtgtacctcgggatgaggaggaaatggttttgagggcaagtggtaggtctctggctaggcctggcggggttctcagaggacagggggtgtctagggccctagatagaagtgtcctgcccaagccctaaagcaggaaattagctggggagttggggtgagaccctggggtcgatggaggcactttccatgggagagtcccacagggtaagggagagggggctgatgtctgacagtctcatagacagttggcttgtggctggagaagtgggagcaaaggagaaatcacctttgattgggagaagtggctctggctcatgtgcaactgagacaaagccagtcctaagagcagcttgtaaattcttctgtgaccacctttaaggtccttcttcctgaggctgtggatgggggtgtacacaggcccagtgtggggggttgagcgtgagtccccgggaaacggtggtcctgagttttggatgctccaggatgaagcctgattctggagtcaatcacagcactaaccattttgagaagacaaacagagccctagaaatgttttattttactttggtttaaccttcctaatgcaaggcccacgagagaattagtacgtaagtttggaaatcaatcaaattctgaagagcaaaaacggaactaacccttctgatgtagttttctgactttatctgaagctgaaatgtgtgtgtaagattggtcgctccaaacaggaccaattcagataagataaaagtccagaactatgatttcaggctcagctgagctctggctaggggtacaagtatctaatatggtatagctaataatgtctcaatcattcaataagatactctcaaaggccttcctccaactagacaaacaaaacaaaataaaaacactagttactttttgttacaaatggattcataaacggttttatactgattcattttaggctttagatcttgacatgtaaagcatatgaactcaacgcataatcaacccaaagtccagtgtttctttttctttcttcttttttttttcgagacagggtctcactctgttgcccaggctggagagcagtggttggatctcagctcaatgcaacctccgcctcccaggctcaagtgatcctcccacatcggcctcctgggtagctgggactacaggcatgcaccaccatgcctggctaattttttgtatagatggggtttcaccacgcagcccaggctggtctcgaactcctgagctcaagtgatcctcccacctcggctttccaaagtgctgggatttacaggtgtaagccactgtgtccggcctagtgttttttatccacaggcgcccagctctacccatgagattacttatcctgtctccccaggaggcaggtggtgtagggagctgctgggaggattagggagaatgttgtgccaaggccagttcctggcatgcaggacacacttgctcagtaaataagagcttggcatacgcttccctactctccttgtctctccataagtgcacttttgaggttctagtttcccccaaaactttgaatattaagcaactcatttctttttttctttttcttttcttttcccttccttccttccttccttccctccctcccttctttcttttctttctctctctctctctctttctttctttcttttctttctttctttccttccttccttccttccttcttttttttctttctgacatggggtcttgctgtgtcacccaggctacagtacagtcatgcaatctcagatcactgcaacctctgtctcccaggttcaagcgattctccaacctcagcctctggagtagctgggactacaggcatgcaccaccatgctcggctaacttttgtatttttcgtagagacagggtttcaccatgttggccaggctggtctcaaactcctgacctcaggtgatctgcctgcctcggcctcccaaaatgctgggattacaggtgtgagccaccacaccaggcctaagcaactcatttcaacacatagttatggaatattctggcagtgtattaggctgaggttctctgtgtgttctgcggaaaagtacctagaaggcatggtactctatgcagaacgttccaaggcataacaaattctgtcttcataaggtagagatcatttaaccattaggaagtgtaactatattgtatgtataccacataaaatcacaaccataagtactcaagtctataacgagtccatactgtcaaattcacaaaaatcagctgtttccagttttctctctctctctctctgtcctgtctttttttatttttttttgagatggactcttcctctgtcacccaggctggagtgcagtggcatgatctcggctcactgcaacctctgcctccccggttcaagcaattctcctgcctcagcctttcaagtagctgagattacaggtgagtgccaccatgcctggctaatttttgtatttttagtagagacggggtttcaccatgttggccaggctggtcttgaactcctgacctcaggtgattcaccagcctcagcctcccaaagtgctgggattacaggcgtgagccaccgtgcccaacctccagttttttcttaatattcatctactataccatgtgtgtgatttcttttgtcatttttcatgtttataatatagttaggctttgtgtccctgcccaaatgtcatcttgaattataatccctgtattccccacaatccccatgtgtcaagggagagaccaggtagaggtaattgattcatgggggcagtttccccccaacgttgttctcatgatagtgagttctcatgagatctcatggtttcataaggggctcttccctcttctctcggcacttctccttcctgccgccttgtgaagaaggtgcctttcttccccttcatcttctgccatgattgtaagtttcctgaggcctccccagccatgctgaactgtgagtcaattaaacctcttttcttaaattacccagtctcaggcagttctttacagcagtatgagaaaggactaatacagtttgttgattttatttgcttgcaactgctagcaggtaagcagtagctggcaccaaacattctagaaaaagaaaattgagtcaaaatttaaaaatcagggctgggcacactagttcatgcctgtaatggcagcactttgggaggccaaagtgggaggatgtctggaggccaggaatttgagaccagcccgagcaacatagtgagaccccgtctataaaaaaaatgaaaaaaattagcgggcatggtgatgtgagcctgtagtcccagctactcgggaggctgaggcaggagaattgcttgaaccttggcgtttgaggctgaggtgagctatgatggcaccactgcactccatcctgggtgataaagcaagatcctgtctctaagaaaataattaaaaaaaaaataaacattcagaaaattctatctagtaattttgttgagcaaattgggaaaagcccttcattctattttggtggaaaacttctttggtaaatgatgggtccccaaactctgcatctagcatttggggagcactgcagaaggcaagcattggatgtggcaggtcgcccatgcttctgtgagatccgagacaagagtacaaatggcagcccccatagcatctgtttaaatatgaaaagttaccaatcaaactgagaaaccgttagagaaaatatgttctaccttcttgtcttaacacatacatctttatcatgtcctagaagaccggatagaatctggtttgggaacatggtggtgtggggatacccagccataccaattctcttcccatcccatcctctattccattccccgccagaaaggtcctgagtcaggggtgtggattcccaacacagggcacaaatgccgcctgtgccccttgaaaaatgccacaccttcttccttcccacatcctggggcttgggggcctggtgaagaggaccacgcaggtccaggcagctggccctgggctgctagggcaggaaactccttcgcccgtgggcaggagcagccagagcgggactagcgggcgccctctcctgtgagggtccagcacaggggccctcctgcctgagtctaagggtgggactaggccggcactcacagggcaagcaggagagcagggaccccactggtcctcgccttgtctgggggcccctggccctgcttctgtaggaggacacgacagttggcaataattccacacctgtgtccccagttcttcccttccctccacctcaccattcacatcctgcttcttcccttccctccacctcaccatgcacatcctgcttccagccccggggctttctcacctggaccactgcaccagcctctgactggcctccctgtggctttccctgctgccatgccccccactctctccacaaagtagcccgagttatcccttaaacatgcactcagcctgtaatcccagtgctttgggaggctgaggtaggaggatcactcggggccacgagttggagaccagccttggcaacatagcaagacctccctctctacaaaaaaaagtttttttaaaaaaacaaagtgaaacatgcactcagatcacaccactcaccaacttaaaccctcctgtcaccacccattgcgcatgggagaaaacccgtgtacatccagctggccacagaccctgcctaaattggcactcgtctctgctcatgccccatccgctccttgactccctagctggctttgccaagcagagcgtctcccagccgcaaggtgctgcgctttgcacttttggttccctggaatgctcttcccaggttggcacgactccttccttcctgtcatttgagaaggggctctcaggttcctcgcagggacctgctgcacactcgtcacccctcccccattgttccgtaggccactgtgtgttttattttcctcatagcaccctctaaaaatggtattttatgtgttccttatcagcttctccccactagagtgccaactccacaaacgcaggaaccttgtctgtcctgttctgcccattcccagagctagggccagcctcagcctatgcgagagcctcaaatatttgttgaacgaacacagatggatttgactgcagaaaactgctaccccgccaccctcctggaactgagtctgttcctaagcctagagttgttcaagggtggccctgaaggatgctggagaagacccgactgacccccgggtcagggatcactacatctgactcagtccggagcttcctgaagcagtttcaggcaaggctgccagggcctggaggacctgctcagtgcctttagggtaactccaaagaggccactgacaggcagttatggcccccaggggcttggctaagcaagaagaacctttgtagggaggaaaatggggccttttttcggggtagctgcagtccagccaggacacaaggctttgtgagcagaggtcacctgagttgggccctacctgaagcgccccctccaccatggctccagagctccccctacctgtagggcactgccaggaggggcgcccagggaagcatggacatggctgagtatcagacccacctagggaaatgggcctgtctcccagctggctcataggggccacagggactgctctatcctgccgacttggcaggccccactgctccagagatagggtggagtccttggagcccattcttgtgcacccaccgttctgaccccatttcttctctttgctgaattccaaggatttgtgcctcaagaggcatcttttaaaaaaattttagcttgatgcctcagctcacacctgtaatctcagcactttgggaggccaaggtgagaggatctcttgaggccagagtttgagactagcctgggcaacatagtgaaacttcgtctctacgaaaaattttaaaaattaactaggtggggccaggcgcggtggctcaagcctgtaatcccagcactttggaaggctgaggtgggcagatcacctgaggtcaggagtttgagaccagcctggctaacatggtgaaatcctatctttactaaaaatacaaaaattagccaggtgtggtggcgggcacctgtaatcccagctactcaggaggctgaggcaggagattcgcttgaacccgggaggtggaggttgcagtgagctgagatggcgccactgcactctggcctgggtaacagagtgagacactgtctaaaaaaaaaaaattagccaggtgtgacggtgcatgcctgtagtcccagctactcaggaggctaagacagaggattatctgagcccaggaagtcgcggttacagtgagctatgattgtgccactgcactctaacttgggtgacagagcaagactttgtctctaaaattaaaaaaaaaaaatcctaataaggtgagaagccaaatcttttgaaaaatcaaaataagagtgtctaggggctgactgcatgacagccccagttccagccttttttccttgtgattctactcagctgcctcaagtctaagcccctcaacactgtgtaaagtagccccaaagtgcagacaatgaagctacgggaggaacgagctgcacacagtgggctacttggaacatttccaaaggctgcatctgctctagcacagtagttggaactcgatttttcccaaaggaagctagtatcaggtcctgctgtggcctgtggaaacacactgtcaacttacaggttaagaaaccgaattttagagtgtaaattagttcaaccgttgaactaatggttcacattgaaagcagtgtggcaattcctcaaagagttaaaagcagaactaccatttggaccagcaatcccgttactaagtatatacccagaggaattaaagcattctatcataaagacacatgcatgcgaatgttcactgcagcactattcacaatagcaaagacatggaatcaacctaaatgcccatcaatgacaggctggataaacaaaatgtggtacgtatataccgtggaatactatgcagccatgaaaaagaatgagattctgtcttttacaggggctgttatccttagcaaactaacacaaggacagaaaaccatgttctcacttataaatgggagctaaatgatgagaactcatgagcacaaagaagggaacatcagaaactggggtttacttgaaggtggggggtgggaggagggagaggaacagaaaatataagctttgggtactgggcttaataccgggtgatgaaatatctggacaccaaacccctgtgacacgagtttacctatgtaacaaaccacatgtacccctgaactgaaaataaaagattaaaaaaaaaaaaaaaagaaaccgaattgcaaaggttaccattcttgacatccaagataaaaccttaactgaaacaaagcaagctgcagaatagcttgcagcttccacttttctggggggaaaaataaacctctttaaatatacatttgttaggtgtatagaaagaagttaggaggacttcacatcaaactgttaatggtgggttctcactttgtgggaagggggataatttgcactttttaatttatatactcttgtattttggactttttaaagagatgagtatatatttattaattttatagtttttaaattataaaaatatgttgtcacttcaattttatagttttataaactgtaaattgttttaagtcacttgaatttactctacaaattatataatgctataatggatgacatatttttataataacttcaaaatgcttttcagtgaccgtattttccaaataaaaaaatctggaggctggcgtagtggctcacgcctgtaatcccaacactttgggaggccaagatgggtggatcatgaggtcaggagttcaagaccagcctggccaagatggtgaaaccccgtctctactaaaaatacaaaaaaaattagctgggtatgggcgcacgtgcttgtaatcccatctactcgggaggctgagtcaggagaatcacttgaacccggagggtggaggttgcaatgagctgagatcatgccactgcactccagcctgggtgacagagtgagactccatctcaaaaaaacaaaacaaaacaaaacaaacaaaaatctggaaacatgctctaaaatagattttttaaaaactgatttgtggattttctcatatgaagaatcatatgcagttatagataataagtcacatttaattctacatttaacaagtcatctttattttaaaagaaaaaagctcatttatttatatataaagaacttctggccaggcgcagtggctcacatttgtaatcccagcactttgggaggccgagtctggcagatcacttgaggtcaggagttcgaggccagcctggccaacatggcgaaaccctgtctctaccaataatacaaaaattggccaggtgtggtggcacgcacctgtaatcccagctacttgggaggctgaggcatgagaatcgcttgaatcttggaggcggaggttgcagtgagccaagatcatgccactgcactgcagcctgggcaacagagcaagactctgtctcaaaacaacaacaacagcaacaaaaagaccttctaaaaatcagtatgaaaaggaattacaatccaaaagaaaactgaaatatagagagagtttattttaaaaagtaaacacaggccaggtgtcggggctcacacctgtaatcccaggactttgggatgccaaggtaggaggattgcttgaggctaggagttcaagaccagcccgggcaacatagtgagaccttgtctctactaaaaataaaagcttagccaggcatggtgttgcatccctgtaatcccagctacttgggaggctgaggaaagaggatcccttgaactcaggagttcaagactgcagtgagctatgattgtgccactgtactccagcctgggtgacaaagtgagactctgtctatcaaaacaagggaaatgcaaatagattttaaacatgcttaaaaatgctaattctctgaaaatgatatacaaattgatatacaaaatgatatactaaatgatatacaaactacaccattggacaggtgaagttgaaaacgtataataatatgctggactggtcaatgaatagagcaaataggtagaattctatattgatacaacctctttggaggataatttagcaatacttacctaattttaaagtgtcattttcctttcaacttgcaattccacttatagaaattgaatcccataaagtcttatgtatacacaaaggggtgcatgttggatattaactggggtacaagggatattgactgcaacattgtttttgtttgtttgtttgagatggggtcttgcactgttgctcaggctggagtgcagcggcatgatctcggctcactgcaacctccgcctcccaggttcaagcaattctcctgcctcagcctcctgagtagctgggattacaggcatctgccaccatgcccggctaatttttgtatttttagagatggggtttcgccatgttggccaggctggtctcaaactcctgaccttaggtgatccacctgccttggcttcccaaagtgctgggattacaggcatgagccaccgcgcccggccaacattgtttataattgtaaaatagaagagtggttaagtgaccatgggctaactggttaataatccctgtgtctgttaaaaaggaggagaaaaaggctgtatgaacacttaaagaaatatctctgggctgggtgtggtggctcatgcctagcatattgggaggccaagagagatcacttgagtccgggaatttgaggccagcttgggcaacatagtgagaccctatctcgacaaaaagattaataagatatatatagccaggcatgctggcatgcgccagtagtaccaggtactcagagctgcggtgggatgattgcttgagcctgggaggtcggggctgcagtgagctatgattgtaccactgcactccacactcctgggtgacagagtgaaaccgtgtctcaaaaactaaaacaaaaaaacctctgatatattcattcatcgttacacagatttgcctacgtggacctggaaatatgctctaaaactggattgtttagtgatttgtgagtttttgcatatgaagaacatacacagttatagacactaaatcacttttttgttgttgttgttagatggagtctcactctgtcgcccaggctggagtgcagtgaagtagccgatctcggctcactgcaacctctgcctcccaggttcaagcgattctcctgcctcagcctcccgagtagctaggattacaggcacacaccaccatgtctggctaatttttgtgtttttagtagagatgggtttcgccatgttgaccaggctggtctcgaactcctgacctcacgtgatccacccacctcggcctcccaaagtgctgggattacaggcatgagcactgcacctggccaacagtaccttatttttattgctggccctgaagaaacctatacagtactcagatacagtaaagtttttcatacaacacgagctcatttctctcaaacatggactggggtttcctgtcgtgttgatttagcagttcggggactgtaggtgcggcaggattgtcccatcccacctctctaattagtctcgtctctaccattttcagtcaaaattccaaaggtcacttggaaggcacatagcccacgaaactgtccagacactcccttttggccaaataaccctccacagcccagattccagtgcagagccctgggaaccaggggcatgctgtttccaatcctcatctgcttagccaacagggagaggtaacaatgaacaaattgagtttcaaccagcatatctttagaacccaatttttgttataattgattagaaaatctagcttacattccaaatgcactctttttttttcttttcttaatcttagtcaaggtgcaataacagttaaacgaaaaccagcatgagtcaggttcctataaaactgtctgctctcagagttcagcatttttctagagcaggaacatttgccggcagtcagcatagaacggggttattctggcctcttacttttctaggggaactcatcataagacaagcagctcacgtggaatctgacactgacatggaatgcacacactgggtggacattgatggagttcttgggtctcactctgttgcccaggctggagtgcagtggtgtgattttggctcactgcaacctttgccttctgggttcaagagactcttatgcctcagccaccccatagctgggattacaggcacccgccaccatgtctggataatttttatatttttaatagagacggggtttcaccatgttggccaggctggtctgaactcccagcctcaagtgatctgcccgcctcagcctcccaaagtgctgggattacaggtgtgagccatgtcgctcggccagggaactcttaagtagaatttgaaaaacagcagcagcaacaacgatacacctagggacattggagtcaaattgataaaactaaataaaaatacaatgttgaacatggtcagaaaaaacaagaccttgcatacaggggtgcaaatattcaaatgaccgtggacttatatcagaaataaatgaggccagaagacagtgaaacaacatcttgaaagcactgggaaaaaaaaccagtcaatccagaattctgtatctagtgaagatatcttttaagaataaaggtgaggctgggtgtggtggctcatgcctgtagtcccagtgctttgggaggctgaggcggtgggggatcacttgacctcaggagtttgagaccagcctggccaacatggtgaaaccccatctctattaaaaatacaaaaattagctgggtgtagtggcgcgcgcctgtaatcccagcttcttgggaggttgaggcacaagaattgcttgaaccaggaaagcagaggttgcagtgagctgagattgtgccattgcactccagcctgggtgatagagcgagaccctgttgcaaaaaaaaaaaaaaaaaaaaaaaagaataaaggataaaggtgaggctgggtgtggtggcttacgcctgtagtcccagcactttgggaggctgaggctggaggatcaactgaggtcaggagtttgagatcagccaggggaaaaaggtgaaaccctgtctctacaaaaaaatacaaaaattagccaggtgtggcggtgtgtgcctgcagtcccagctgctcaggaggcttaggtgggaggattgtttgagcctggaaggcagaatatgaagtgaatcaagatcatcctgccactgcactccagcctgggtgacagtgcgagaccctgtctcaaaaaaaaaaaaagaaaaaaaaaagaaaagaaaaagaaaaaagaataaaggtgaaataacgtggacataaagatgggaacgatagacactggggactactggggggagaggaaagggggtgtgggctgaaaaactacccgttgggtactgtgctcactacctgggtgatgggatcatccgaaccccaaacctcagcatcacacaatgcacccacatgacaaacctgcacacgtaccctccaaatccaaagtaaaactatatatatatatataaaaaggtgaaataaaaatgtttttagtttttaaaaaaactaggggaatttgttagcagcaaacctgagctacaaggaatgctaagggtactttaggaggccaaggtggaaggatcgtttgaggccaggagttcaagaccagcctgggcaacatagtgagatcccatctctgttgaaaaaaatgctaaaggaagagttctgcaggctgaagggaaatgaaaccagatggaaacctggatctacaggacagaatgaagctcgtcagaaatggtaaatatgtggataagtagaaaagattacttttgtcctcttaatttctttaaaacagataattgtttaaagcaaaaattatattgtgttatggggtttataatttctgtaggtgtagtaattatgacaactataacataaataacagggggtgtacatgagcctatatagttgcaagctttctgcattttatgcaaagtggtgcaatataaacttttggcaggctataaaaagttaagggtgtatattctaaccctagggcagtaacttaaaaataagccaaaaaggtgtagctgtaaagcaatggacaggttaaaatggaattcaaaaatatattcaggtaatcaaaaggaaggaagagaaacagaattaaaaaatagaagacaaacaaaacagtaaaattacaggcttaaatctaattatatcaataattatattaaataagaaggaatagcattgtagttaaaaggcagagattgtcagaatagataaaaatgtttgggaggccgaggcaggtggatcacaaggtcaggagtttgagaccaccctggtcaacatgatgaaaccctgtctctactagaaacacaaaaattagcctggcgtggtggtgcgtgcctgtagtcccagctacttgggaggctgaggcaggagaattgcttaaacctgggagatggaggttgcagtgagctgagatcatgccactgcactccagcctgggtgacagagcaagactccatctcaaaaaaaaaaaaaaaaaaaaaaaaattccaaggcccaattatatgctgtctataagcaacctgccttttttttttcttttttttctttttttttttttcttttaagacagggtttcgttctgtcacccaggctggagtgcagtgacaccaacacagtttactgcagtctccacctcccaggccctcatttctcaatctcctaagtagctgggaccacaggcatgcaccaccatgtctggctaacttttgtatttttttttagagacagggtctccctttgttgaccaggctggtctcaaactcctgggctcaagtgatttgcctgccttggcctcccaaagtgttgggattagaggtgtgagccaccgtgcctggcctataagcaacctactttaaatataaagacacaaatgggttgaaaattgataggaaaagatatatcatgtaaaccttaagcataagaaggcttaattggctttacaaacattaatagttttcaagacaaacaatattaccagaaaaaggaatcttttataatgataaaaggtcaatacattatgaagttgtgatcattgtaaatgtgtatatacctaataacagagccccaaaacacataaagtaaaaatggacagaaaaaaagggtgtgactggaggttgagggtggaagacttttttttaaatttcaattttatacttcatatggtttaaattttaacaccaaatgtgtattctgccatcatcatcatcatcatcaaaagagtgaaaataatatttgagccaagtcttaaaagatgactaagaatttttcagaaaggtggtaagggagggcattccaggcaaaggtcatatgtgtgccagcacagggaggcatgaaattgcctgatgtgttctggtcctgcagttttttggcaagtctgaaatataggattgggttggtattactgaggaggaatgggagatgagcaacagacaagtagaagccagatgtggaaggggcttatcagtgtgctcatttgaactttatcttgacagtcatggatagtcactaatgtgtttttcaaagggaggatacaggattttctctgggctttagagagacaattctgactgcagcttagagaatggtttagaggagaccagagtgaaggcagagtaacttctgggagatgctgtagtaatgcagattagaaatgctgggggcctaaaccaggaaagtagagcagagatggagaaaaaacaagtgtggttttgaaaggtatgtagggaccaggcacagtggctcatgcctgtaactccagcactttgggaggccaagccaagtggatcacctgaggtcaggagtttgagaccagcccagccaacatggtgaaactccgcctctactaaaaatacaaaaattagccagacatggtggtgcatgcctgtaatcccagccactcaggaggctgaggcaggagaatcatcacttgaacctcaagaggcagaggttgcagtcagccgagatcatgcctttgcactccagcctgggtgacaagagtgaaactccatctcaaaaaaaaaaaaaaaaaaaggaaagaaagaaaaataaaggtacatagtaagcaaaataatgagaattttgcaattctggatctaagtgatgagagacattgacatctattaactcctgcaagtttagtctcatgaaaccacttagtgacacgatactttattcccatttccataaaacaatattgacataatgatatctaccatttaaaaagtttattttattcaatgcaatccctataagaatctcaactggtttctttatgtaatagaaatggacacactgctgatcctaaaattcatgtgaaaatcaagggacttaaaatagccaacataatcttgaatagaagaaaaatgtttggaggacttaaacttcctgattccaaaacttactacaaagcaaaggtattcaagacagtgtggtactggcatgaggttagacatatagatcaatggaaaagaattgagagtccagaaataaatccatatattaatggtaaattgatttttcaacaagggtgccaaaagcattcagtggcagaaaaaaatagtctcttcaatatatggtgctgggacaactggatatctatatgtgaaagaatgaagctggacccctacctcacaccatatacaaaaattaattcaaaatggatcaaagacctaaatgtaagagcaaaaactatgagattcttagaagaaaacaaataagtaattctttatgaccttggttaggcaaaatggtttctcagatatgacacccaaagcataagcaacaaaataaatatagataaattggacttcatcaaaattaaaaatttgtatgcttcaaatgacactaataagaaagttggctaggcttggtggcccatgctgtagtcccagcactttgggggggctgaggtggaaggactgcttgaggctgagagtttgagaccagcctggacaacatagcaagaccctgtctctcaaaaaaaaaaaaattagccaggtgtgtggtgcatacctatagtcccaactaccctggagctaatgtgggagaatcacttgagcctaggagtttgaagctgcagggagccatgattgtgccactgcactccagcatgggtgacagagggagatgctgtctcaaaaacaaaaaacaaaacaaaacaaacaagaaagtgaaacgactaaacaatggcagaaaatacgtgcaaattgtacctctaataagggacttatatctagaatacataaagaactcttacaacccaagaataaaattatcccaattaaaaagtggacaaaggccgggcgcggtggctcacgcttgtaatcccagcactttgggaggccgaggcgggtggatcacgaggtcaggagatcgagaccacggtgaaaccccgtctctactaaaaataaaaaaaaattagccgggcgtggtggcaggcgcctgtagtcccagctactcggagaggctgaggcaggagaatggcgtgaacccgggaggcggagcttgcagtgagccgaggctgcgccactgtactccagcctggggtgacacagcgagactccgtctcaaaaaaaaaaaaaaaaaaaaaaaaaagtggacaaaggatttgaataaacatttctccaaaaaagttctacacctggccaataagcacatgaaagggcgctcaacatcattattcctcaaggaaatgcaagtaaaaacacaatgggctactcacttcacagccactaggaagcctgtaataaaaaagacggctagtaagtgttagcgtggggagactgataccctcataccctgctggtggggatgtaaaatggtgtggccacttaggaaagcactctggcaatttctcaaaaagagctgccatttgacccagcaattccatgcctaggtatataggcaagagaaatgaaaatatgttgtattagtctgttttcatgctgctgataaagacatacctgagactgggtaatttataaagaaaagaagaggtttaatggactcacagttctacgtggctggggaggcttcataatcatgacagaaggcaaaaggcatgtcttacatgctggcagggaagagagggctcttgcagggaaactctcctctataaaaccatcagatcgcgtgagacttactcattatcacgagaacagcacgggaaagacctgcatccatgattcagttatctcctgagtccctcccacaacacgtgggaatcatgggacctacaattcaagatgtgatttgggtggggacacagtcaaaccatatcatatgtccacacacaatctcatacatgaatacttatagtagtattattaataacaggtaaaaggtggaaccaatctaaatgctcacccactgctgaaaggataaacaaaatgtggtatatccacatgatggaatattacttagctgtgaaaaggaataacatgctgatatgtgctaccacacagatggaccttgaacatattatgcaaagtggcagagacagttacaaaagatgacacagtctatgagtccatttatatgaagtgtcctgaacatgcaaatctatggagacatagaggagattaatggctgcctagggctgtgaggagggggtgattgggggtggcacatgatagctaaaggggacacagctggtttggagagtgaagaaaatgttctaaaattgtactgatagttgcacaactctgtgaatatacaaaaaaatcattaaattgtacacttaaaatgggtgaattgtatggtgtgggaattatatctcagtaaagaagttaccaataacattacaaaacaagaaaaagagtttattttattttattgagaggtggggcttcaccctgtcactcaggctggagtgcaatggcaccttcttagttcactgcaacctcgaactcctaagctgcctcaaactcctggcctcaagcgagcctcccacctcagcttcctgagaagctgggactacaggcatgtaccaccatgcccagctattaaaaaaattttttttttgtagatggagtcttgctttgttgcccgcgctggtctcaaactcctggccacaagcaattctcctgccttggcctcccaaagtgctaagatcacaggtgggagccagtgggcccagcccttttaatttttaatttttaagttgtacagatgatatatgtgtattttatttttaagaaaatcaaagtatagcaaggcgtagaggaaaacattttaaattacccccttatcccaaattttgaatcctaccgcagttctaagaggaagccactgtcatcagtttaatgcaaatctttcttcacctttttttgtgatgtataggtatgaacgtaaataagaagatgtagatacatcatttagttttctgactttaaaaataaaagggttcgtgtggtatgtattgctctgctgcttgctttttcacttaacattgtgttttggagatccctctgtgttattacatagagatcttcctttgctttaaaaaatactgcatggtataatattatatagcaaagatgtgtgtaggcttaatacttagtagtgaaattgttgggtcaaagggtgtggggtttaaaatttaacagaggccgggagcagtggctcacacctgtaatcccagcactttgagaggccaaggtggaaggatcacttaaagccaggagttggaaaccagcctgggcaacatagtaagaccctacgtctaaaaacttggctgggtgtggtggcacacacctgtggtcccagctgctttggaggctgaggtgggaggattgcttgagcccgagagttcaaagctgcagtgagctatgatcacaccactgcactcctggaggggtgacagagcaagaccctgtctcttaaaaaaaaaaaaaaaagaaaagaaaaataaaatgtaacagatactacacattgttttttagaaaggctacacagtttcacacactcaccagcagtaaatacatacatctttcaataacattttgtaatatcaaataatggatattaatacttttaaattttgtttgtttgatagctcattgttgctttaacttctattttcctgattacttataaggttaatgaatatgaaattccctaatgttttcactctgagttatttttcttaggctgtctggtgtattttttacatctttttatttcaagggctttatttttagtttgttttacccatagctcttgtaaacagcaagtagctgattttcttggttgaagttcttataaatttacctgatctggcagctgaaaaaaagggaacttgcaaaatttaacagtttgttaatgacaaatcactaaaattgtttaaaagttgtctatttggccatgtattgtcttagtttagcatattatcatgtgctgtagaattaaagtttatttatatagtacattttacgtttttgtttgtttgtttgttttgagacagtcttgctctgtcgcccaggctggagtgcagcggcacagtctcagatcactgcaacctctgcctcccgggctcaagcaattcctgtgcttcagcctcctgagaagctgggattacaggtgtgcactaccatgcctggataattttttgtatttttagtagagatggggtttcaccattttggctaggttggtcttgaactcctgacctcaagtgatccgccccccttggcctctccaaacgctgggattgcaggtgtgagccactgcgcccagcccattttaagtttgaccaaaaagaattccacttggtcattatgatgattttaaaacatgtccacaaattgtttgccacttctctcactaaacgtggagtctaattcccctgccctcgaatgtgagctggccttagtgacgcacttctaacaagcagaatgtagctctggtgctgtgttcccttccagcttccagctggctcttttcctattgaaatccatgtccttggaacctagccaccatgttgtgaggaagcccaagccacgtggagaggaaaggaggctcccagccaacagccagtatcaactgccagacacataaatgaaccagccctgggatgactgcaactcccagcttataagtcttccaaccaaggccccaaacaccctaaagcaaaaacaggccatcttcgttgtaccctgcccaaattacctatccatagaatccgtgagcaaaataaatggttgatgccattaaattttggggtaatttattatgcggccacagtaactagcatatttattgataaagagagttagccaggcatggtggctcacacttataaccccaatgcttttggaggctgaggtgggagaatcacctgaggccaaatatgtaagaccagcccgggcaacatagtgagatcctctcttaaaaaaaaaaaaaatagctgagtgtggtgggacatgcctgtggtccagcccaggaggacaagttgcagtgagctatggttgtgccactgcactccagcctgggcaacagagagagacagaatctctctctttaaaaaaagagagacagttttagaggtgtttctcaacaccttccaggtggggtgaaaaaaagaagacaatcttgcctagaaatgtaattatgttattctagtaaatcacttctccactgtcctcggtgagatatgtttgaaactgtttataccatcttattttaggtttcctatttttatttctaaatagaaatatttttctttttttgtctttcttttttcattaaaaaaaatcgtttccttcattgaagaataggattttctttcttccattctttttccctctgggaattaggatatatagaatttatgcatcttttattcttctaggattacaatcttttttttttttttttttttttttttgagatggagtttcactcttgttgtctaggctggagtgcaatggtgtgatctcggctcactggaatctccacctcttaggttcaagcaattctcctgcctcaccctcccaagtagctgggattacaggcatgcaccatcacgcccggctaattttgtatttttagtagagacgaggtttcaccatgttgaccatgctggtctcaaactcctgatctcaggtgatccacccaccttggcctcccaaagtgctcggattacaggcgtgagccaccgtgcccagcctacagtcacatttttaaaagatattttttctaccaatatttagtggtgcccagtatctttcctgtcctgaacaagacaaagaacttagtaggatttcacgcctctccttcttctctgcccctccatctctcatgtttacgtcatctgaacttgagttttagactacctttaaaaaaaaagcaattatttatctttaattataagttcatgtccccaccccattttttttttttttgcttgtcactgtttttagtatcacttatctttctcatggattcattttctgacttgttggaatttgtcttataataaaattttcagggaattctttgagggtaaattttatgagtctttagatgactgaaaatgtctttattttgtgctttccatttttttttttttttttttttttgagacagaatcttgctctgttgcccaggctggagtgcagtggcgcgatctcggctcactgcaagctccacctcctgggttcacaccatcctcctgcctcagcctcccgagtactggggactacaggcacccgccaccacgcctggctaattttttttgtgtgtttttagtagacacagggtttcaccatgttagccaggatggtctcgatctcctgacctcatgatctgcccacatcggcctcccaaagtgctgggattataggcgtgagccaccgcgcccggcctgtgctttccatttgaatgatggtttgacttggtgtagagctctgggtttaaaaattgtatttcttttcttttctttttttttttttttttgagagagagtcatgctctgtcacccaagctggagtgcagtggcatgatctcgactcactgcaacctctgcctcccaggttcaagcaattctcatgcctaggcctcctgagtagctggaattacaaatgtgcaccaccacacacagctaaatttttgtatttttagtagagacggggtttcaccatgttggccaggctggtctcaaactcctgacctcaagcgatcagcccacctcagcctcccaatgcctgttgggattacagggatgagccaccgcacccggcttaaaaatggtatttatttcagaactatctatagtgtgttctatcatctcagcacccagtgttgccagtgacagacatgatgctaatatgattgtcattcttctgtgggggcctgatttcccatctctgtttggcaggattttctctttctcatgctgaaatttcatgagatgaacttcctcttcattcttctcccttcatcagtcttcacccatcttctcttttgttccttctattgtaacaagggaggtgaccctccttctgcccccagtcaagccctgttctcatgctctggacgcattttctttcacgttctcaggggtgccaccccacctgcattgaactatgctctagggtcccccacttaagaaaacaaaacgcctctctctgactacgcacctttccacccatctccctatttctttctttcttttttttttttgagacagagtctagctcttctcccaggctggagtgcagtggtacaatcacagcttacggcagccttgacctccggggctcaagccatactctcacggcagcctcctgggtagctgggaccacaggtgtgcaccactgcgcccggctaattttttttttttaattatttgtagagacagggtctagctatgttgcccagggctgctcttgaactcctggcctcaacgatcttcctgccttggtttcccaaagtgctggggttacaggcgtgagccaccacacctggcccttacttcttgactcttcactcataactaaacttcctgacagagttctctgtaaacactatctctgcctattcacctttcattgatttcccaatgcggtttcatctgctccctacactttactgaggttgttgttggaaaggcgccctccctgttttaaggcccagcagtggcccctcccctggtcctcagcagcgtgctgcagcctcccgttggtgaagtgcttcctctcttgctgtctacctgctgcttccagtctccggcgtcagctcctcctctcccaggggcagcctcacttgtctcctctatctgcactgttcttctggggactctaatcctctctaagggcaccttgttgatcgccttgttgtttagtaccaaattcatgtcttcagcccagaggccaagcctgagcatcaccctctaacatctgatctctctatctgtctatttcacaggtatctcggaattaacaagtctaagatgaaatcttggtttccctgtgaacttacctcctgcccctaatctgccccttctttccagctacttaagccagaatttgaggagccaatctctacctctccttcttccccaccgttccatgcctaatctcttataatctattctctcctctttggctcaaaatagacctatcaacttcttatccccgctgccaataccctagtacaaaccactgctgtctcccacctggaccacaacgatgggctaaccctaactgggctccatgcctgccttcctgttcccttaccatacattctccaaccagaggcactgttgcaaaaacataatccagtgcataacttccctttgcgcttaaaataaaccctacaaggcccagcatgatccagcccctgcttctctctctccagcaacacctatgtccttctccagccccacccagcttcacaccttcattcatgcaggaacttcggtctttcagtttcagcctctgtgtcagcaaagaccccttccattttgaagagaatcaaccagttgaggagcgggtggatgatagagcaagttgcccacagagacagcaaattggactcattctcccttccagtgacgaaggatatttatttttctgactcaggactaaagggggctgagaggcccatgctgggaaaagtacttgcaatacatatggcagaggaagggttaatatcctacacgcacagacatccttgagaagaaaagcacaaaaaattcaatgggaaaaggagggggaggaatttaataggttttccacaggaagagaaatttaaatagccaataaataagtgaaaagatcagtttcattagtaatcagggaaatgccaattaaagaaactagagcaggtttttaaagaaaaaactcatcagattggcaaaaattaaagagtggctggctggtaagaatacatgaaatcagacactgtaccttgtgggtagaattgcagcaatgctttggggaaataattcggcaatgtcattcagataaaaaaaacatacacgtggccgggcaaggaggctcacgcctataatcccagcactttgggaggctgaggctggtggatcgcttgagcccaggagtttgagaccagtctaggcaacatggcaaaaccttgtccctacaaaaaacacaaaaaattagctggacatggtggcacaggcctgtagtcccagctactcaggagtctgaggtgggaggattgcttgagcctgggaggcagaggttgcagtgagccaagattgcgccactgcactccagcctgagtgacagagtgagacgctgtctccaaaaaaaaaaaaaaaaaaaggaaaaaagttccctttgacccagaaatgacaattcttgagaatctatcttctaaaattaccagcctacaagtatatttacaccaagatggcattttagcactgtttgcaatggcagaagtcagaggagagggtaggaaaagattctaccaaaacagaaaatcactcatgatgtcatgttaagtaagataggaagaaacaaacttctatcactattactccaaatctgtaaacattgactaagtatgtggacaaagggtagagggtgccatgtatctacagaaatattgatttaaacagctcgtggaactgtgggggagttttgtttgaattgtaatattgttttgccaattatgtaaataattttttaaaaaattattttattttattttattttattttatttttatttatttattttttttgagatggagtcttgctctgtcaccgaggctggaatgcagtggtgccatcttggctcactgcaacctccacctcccagattcaagagattctcttgtctcagcctcccaagcagctgggattacaggcgtgtaccaccatgcccggctaatttttgtatttttagtagagatgggatttcgccaggttggtcaggctggtctcaaactcctgacctcaagtgatcaccctgcctcggcctcccaaagtgtgggattacagacgtgtattttaacttttttgagacagttttagtctatcccccagcctggagtacagtgctgcgatcatagctcactgcagccttaaacccgtgggctcaagtgatcctcctgctttagcctcctgagtagctggaccacaagtgtgcgccaccacgcctgccttatttatttatttatttatctacttattggcatatttatttatagaggtggggggtcttgctatgttgaccaggctggtcttgaactctcagcctcaagcaatcctccctcctcggcctcccaaagtgctgggattacatagtgagccactgtgcctggccatgaatggcaaataataaaaaaaaaaacccacaaagaagccataactgagcattcttctgttacttgatggatctgtagagaaattaaactttgctttcaataagacaaactactttcatcagagagatttccaaaaatagtacttcctcactttctggtgaaactattcctcattttgtattgctttatactaatattttttggtttaatattgaactcaaccgctttttcaaagtttttgcaatacagctagtatattttccctactgaagacatcctcttccttctaaaaaaacaattgcttggttggttttgcccattatataattgtaaacagtggacacagatgacccaaactaccccttggagctttagtctttcgtgatggaccaattcctccattcttttaatagctttggttcctctttgcacgctgccagccagaaaactctacatgcttgtggtagaaagctgccctagctaagcacagttttctgggtgtggctctaccgtacttccctcatctgagcagccatggctctcgctggcctttttgggttctctggcactagctggtctgtgaccttctcctgagagggcctcttcagtgtctctatgtgactgtgctaccaccaactacggccacagtctctatcactcatactctctgccacttatagactccactaaatagatctatactttcccaatcacatgtgagcgttaacatgtccaagctcacttactatgatgactgttatcatttttaaaaggagaatgacaagtgttggtgaggatgtagagaaattgaacattcatatattgctggtagaaatgtcaaagggtggccaagcatggtggctcatgcctgtaatcccagcactttgggaggctgaggcgggtagaacacctggggtcaggagttcgagaccaacctggccaatatggggaaaccccctctctactaaaaatacaaaaattagcccggcgtggtgacgtgcacctgtagtcccaggtactcaggaggctgaggcaggagactcgcttgaacctgggaggtggaggttgcagtgagctgagattgtgccactgcactccagcctgggctacagagcaagactccgtctcaaaaaaacagtgaaaagttgcagtcactgcagaaaacaatatggtggttcctccaaacattaacaatagaattcctatatgatccagcaatttcacttctgagtacagacctgaaagaactggaagcagggtctcaacaaggtatttgcacatccgtgttcatagcagcattattctcaatagccaaaaagtagaagcaccccaagggcctatcaatgcatcaatggataaacaaaagatggtacgtccatacaatggaatattattcagccttataaaggaaggaaattctggtgcgtgctacaatatggataaaccttgaggatattatgctaaatgaaataagccagtcgcaaaaagcaaatactgtatattctaagcaaatactatatgaggtacctagggtagtcaaacttatagaaacagaaagcaaaatggtggttgccaggggctggggctggggggagtggagttgttcagtgggtacagtttcagttttgcaagattaaaagagttctggagattggttgcacaacaaatgaatgcatttaatacgactgaaacatacacttaaaattggttaaggtggtgaattttatcttatgcatattttaccaggatttaaactttttcttaaataaaaaaaaaaaggcttggagctgggatccaaaccccatcatctggtggcagtgctaactctgaacagtaggctatgctagtcctgcaggtaagaggacccacacacattagaaggcagttcatgttcccactcctgccagagcgtgcaccctggcggtctcactccccagcccaagcagcttatcaatggattccttatatgtacattcagggcactgcccctccacccaccccacctctgtccagctgggttctggtaaactcatttctgtgtcttcattaattctctcatgactggtgtcttagcagccaccctcaatcacacacaacaaaagcagcacatcctctatcacctataaagctggagcctgggccaagcgtggtggctcacgcctataatcccagcactttgggaggctgaggcaggaggattgctttagcccaggagttcgagaccagcttaggtaacatagtgagaccctcgtcactacaaaaaaatttaaaaaactagccaggtatggtggtatgcacctgtagtctcagctacttgggaggttgaggctggaggatcgcttgagcctgggaggtcaaggccgcagtaagccatgatctgagccactgcatttcagcctgggcaacagagcaagaccttgtctcaaaaaaaaaaaatctggagcctagtgagtggtgaacacacattaattaataatttaataaattattaattaattgttggtaattaataatcaccatctggttattaataagcatttaattaatatgtaataagtaatagcattaaatgaatatagacaaaaattgagaatttaaaattggatgtaagaaataacttcttggtaggtccactttatttcttttattctttttctttttttctttcttttttttttctttaaagcgataagggcttgctctgtcatccaggctggagtgcagtggtacaatcacggctcactgcagccttgaactcttgaagtgatcctcccacctcggcctcctgagtagttgtgactataggcatgcaccaccacacctggctaatttttttgttttttgtagagacagagtcttgctatgttgctcaggatggcctggcctcaagtgatcctcctgccacagccttccaaagtgctgggattatgggcatgagccaccatgcctggcccactccatttcctaataggtgacattgtggcatacactatttgtacatatctatgctatattatgcctttctgaggtcatttattattaaaggaaatttttttttgagacagggtctcactgttgcccagggtggagtacagtggtgaaagcacagctcactgcaacttcaacttcctcaagcaatcctcccacctcagcctctcaagtagctgagactacaggtgcatgccaccacacccagctaatttttgtattttttgtagagatgggggtctcgctacatttcctaggctggtcttgaactcctggccttaagtgatctgcctgctttggcctctcaaagtgctgggattacaggcatgagccacggcacctggcctctgaggttatttaaatctaattctgcttaataacaatttaggaatatgctaaattgcctcttaacgtgttttcccattggttaagtccagaatccatcagggttttataggtcttactgacttacaagcaagaggaactgagtctagttaacttaaaccaaataatctatggaaaaaatatggagaagctcatagaaaccaagaaaaaacctggaacaactgcacaaatgacagtcactagagcaactccaggaatccagatggcaggaacggaccagcatctactatggtgccgctgctgctgagaagaaccagcccagccattttctttgtccctgctgtcatcattggaattcgcaagaggaacatctgatattgctctagcctgcttaaccaaccaatcacagtgactctgttgtggcccggccaggctggctgctcaaagaagaatttgtgccattatcaaaagaatcagtgggtgatgacaaggacgagctgtgtccaccccaaagactcatgagcctttctccttggcagtgccttccaaccaagcatcttctttttttttttttttttttttttttttttttgcccaggcaggagcacaatggtgtgatctcggctcactgcaacctccgcctcccaggttcaagtgattctcctgcctcagcctcccgagtagctgggattacaggcatgcgccactatgtccagctaatttttgtatttctagtagagatggggtttctccctgtttgtcaggctgatcaagaactcccaacctcagatgatctgccccccttcggcctcccaaagtgctgggattacaggcgtgagccactgcacccggccccaacctagcatcttatggacgttacttggcttatatagactcaggtatggctttaattttttaaatgttaagtaatttttaaccagtccctaaaatactgtcaccctccgtgacatcacctctctgtccacacagagaatggacaaggtccaggagagcacaaatctaccccatccattttgaccccaattccagtttatgaaattgataaatacctggactgtctatgcaagacactttcttgtggcaagtcaagttctattttcctattaagttatttacaatattaaggttttgtcctcttcatttttgactgttcttcagtaaatactggccatgactatgggactgtcttatgaattaagtgatgctctgttcaaagactactccatgtgagatcctgtaacactgctgcttcagtaaagctgttttcttctacctttggctcgcccttgaattctttcccgggcaaagcaaagaactttcttgggctaagcccttatctggggctcacctgccctgcatcagtattagcacaaggacagacaaactgaccagtggaaaagcacgtacagatacatacagtcaactgatttatgaccacagccacctgtattgcaatgaggaaagaaaggatgaactcttcagccaggcacagtgatatgcacctgtaatcccagctactcagaaggctgaggcaggaggatcccctgagcccgggagtttgagaccagcctgggcaacagtgagaccccatctcttaaaaaaaaaaagagagagagagagagattatctttgataaatgatggaaataatagtgggtcatgctgccctatcctatgtggatgggcctcatccaatccactgaaggcctgaatagaacaaaaggctgtgtaagaaaaaattctttctctctgtgtggttgtctccaaactgggacatgggtcttctcctgcatggaacttaaaccgtcagctctcctgagtttggacttctcagactctgtaattaggtgagccaattccttgtaattaatctctttataaacacacagacagacacacacattctattggtctgtttttctggatagccctaatatagtatgttatactttgacaaataattttttaactgtttaagaaaatatgtgaataaaaaatctggcctggcatgatggctcatgcctgtaatcccagcagtttgggaggctaaggtgggtggatgaccttaggtcaggagttcaagaccagcctggccaacatggtgaaaccccgtctctactaaaaatacaaaaattagccggatatggtggcatacgcctgtaatcctagctacttgggaggctgaggcaggagaatcacttgaacctgggaggtggagttgcagtgagctgagatcatgccactacattccagcctgggcgacacagcgagactccatctcaaaaaaaaaaaatttctccagtgactaagatctataaaaatatcatcaaatggaaaatctagtgtgaaaagggcaatagccaaaattaagacctcaatagatggagttaacagtcaatgcacattgaagagaggtcactaaactggaaggcaggtggattgaaaagctgaatggagagatgagaaggtcagtgaactggaggataggtccagactgaagtacggtgagaggaagaacatggaaactatagacagtaatttaagaggtatgttaaaaatgtttaatgtcctatcattggggttcccaaaagaggaaagagagaaggaggccgggcatgatggctcatgcctgtagtcccagaactttgggaggccaaggtgggcggatcacttgaggccaggagtttgagaccagcctggccaacctggcgaaaccccatctctactaaaaaaaaaaaaaaatacacacacaaaaaattagttgggcctggtggcacatgcctgtagcctcagctactcgggaggctggcgcatgagaatcacttgaatctggaagtcagagattgtggtgagctgagatcatgccactgcacttcagcatgggtgacagaatgagactctgactcaaaaaaaaaaaaaaaaaagagagcaatagaatgaatcctaagctgcatatatacaaagaaagccatactcaagcacatcctcacaaatacactaaaaatcaaagagaaatcttaaaagtatctagaggaaaaaaaatcacattatcttaaaaatgaacaatataaatgacagctgagtttttgatagaaaggatagaagccaggtgaaaatggaataatgtcttcaatgtgatattaagacataatttttgacttcaagtcaaaaatgactttaataatcaaaagagtaataaaaaaaagagtaaaaaagaagataattgccaacctagaactctatgttcagtgacctatgcttcagaaaggaaggcgaaatgaataaatgtttaagcaaacaactgagagaattatttacttgtatacccacactagaagaaatgctaaaggagttttttgtttttctttttgtttttttgagacagggtcttactctgttgcccaggctggagtgcagtggcgtgatcatggctcacagcagcctcgacctcctctgctcaaaagatcctcccacctcagccttccaagtagctgggactacaggtgtgcaccaccatgcttggctactttttgtattttttttgttgaggtcttgctttgttgcccaggctgatcttgaactcctggactcaagcaatcctcccgccttggcctcctaaaatgtggatttgcaggtgtgagccaatgtgccccaaaggagttcttcaagcatgagaaaaaccattccagagttaagggcagaaattcaggaaggaataaagagtaagagaaagcataaaatatgtgggtaaatctaagtgaacactggccacatcaaacaaaaataataatgacttctgggttttataaacacctagaatcagaatatatgtcaataacatcacaaaacaagggaagggactttaccagaagcaacctttgaaacaaagatctgagtccaaatgatttatttgggaagttaacccagatcacatcagtatgggacatgggaagtgaggtagggaagggaagggaaccaataaattgtgcataatcccacaaagtatcgctctggctaactgaagcttaattctgcttggaaaccctgggaacaaaggtggaaaatgcagctcagagttaatagcacctgaagcacatagaagatgggcgagttatgcagcaactgtggccagtgatgggttgaaaactactccagggaaattttaatgtcccggcacttctagccagcgctatactcagcctccacagaagcccttgggcggaggtgagtcacagatgctgggagttgtaaactgagccaggatgtgcaggaatgggagtgccaggggatttagatgggggcatagaaggcatctactgcaggaaaagaggaagttaaaatattctaaatgtattcttaatcatccgggaagaaataaatgtaccaactcatactggcgctagtaaatacaggatgcatattgcaatctgcagatttcaaatagtaaaataatatgtatttgagaagctagtagagtggtgaaatggagtaataaaaatgactcagccaggtgcagtgacatgtgcctgtaatcccagctacttgggaggctgaggtcagaggattgcttgaggccaggcgtttgagaccagactgggcaacatagaaagaccctgcctctacaaaaaaaataagagttaattaaaaacagctgggcacagtgactcatgcctgtaattctaatgctttgggaggccgaagcaggaggatcacttgagtctaggagtttgagaccagcctgggcaacatgatgagacttcatctctataaaaaattttaaaaattaacctagcactgtggcacatgtttgtagtctcagttattcgggtggctgaggagagagaatcccttgagcctaggagtttgagactgcagtgagctatgatcacaccactgcactccagcctgggctacagatgaggaattaaaaaaaaatgacttgaataatcaaaatgaagataagagagttaaaacaatgaagagagaagaaggactgatgatagattttaatcttatgtgtcactaattgcattaaatataaaaagatcaaatattccaattaaaatacaattatcagattgaataaaaaacacaatccaactaaacattgcttacaagagacacacattaaatataaagatatagaaaaactaaatataaaactataggaaaatgtagacactgtagacatcaaccaaaacacagtggatgcgcagttatagtcagataggacaaaacaaggctaaggcagaaagcattaagaagttatgactagggctaaagaggggtaatgagaaaagaatcaatcaccaggaagatacgataattctaaacttgtctgacttttggctctctgagcagcgccatggtggttggcaagaacaagcgtcttttgaaaggcagcaaaaaggaagccaagaagaaattggctcatccactttctaagaaagattggtgggctgggtgtggtggctcatacctgtaatccaagcactttgggtggccaaggcaggaggatagtctaaggcaaggagttcgagaccagcctgggcaacaaagtgagaccccgtcttttcaaaaaataagtaaatacatacataaacaaacagacaaacaagcagacaaataaatagcagggtgtggtggtgcatgcctgtggtcccagctacttgggagactgaggtgggaggacctctcaagcccagaaggtcaaggctgcagtgagctatgatcacaacgttgcactccagtctgagtgatacagggagactctgagaaaaggaaggaaggcaagaaggaaggcaggaaggcaggaaggaaggaaagaaggaggggagggagagagggagggaaaggaaaggaaaaggaaggaaggaagagagaaaggaaagaaggaaggaaggagaaagaaagaagaaagaaagaaaaagaaagagagaaagaaagattggtatgatgtggaagtgtgaaagctcctgttatattcaatataagaaatatttgacagacactagtcaccagaactcaaggaaccaaaattgcatcagttggccttaagcgtcatgtgtttgaagcgagccctgttgatctgcagaatgatgaagttgcacttagaaaattgaagctgattactgaagatgttgagggcaaaaactgcctgcctaacttccatggcatggatcttacctgtgacaagatgtgttcaatggccaaaaagtggcagaccatgattgaagcttatgttgatgtcaagactatcagtgattatttgctttgtctgttttgtgtggttttacttaaaaaatgcaacaatcagatacggaagccctcttatactcagtaccaacaggtttgccaagtctggaagaagatgatggaaatcatgacccaagaggtgcagacgagtggcttgaaagaagtggtcaataaatggattccggatggtgttagaaaaagacataggaaagacttgccaatctgtgtatattccttgtgatgtcttcatcagtaaagtaaaaatgcggaaaagcccaagtttgaattgggaaaacacatggagcttcatggggaaggcaggaattctggaaaagctactggggatgaggccggtgctaaagttgaatgagctgatggataggaaccaccggtccaataatctgtttaaaattcagactttttttttttttttgagacagggtctcactctctcactctgctgctcaggctggagtgcagtggcccaatcatagctcactgcagcctcaaactcctgggctcctccttcctcagcctcccaagtagctgggactacaggtgtgtacaaccatgcctggctaattttgtgtgtgtgtgtgtgtgtgtgtgtgtgtgtgtgtgtgtgtgttttgttttttgctggcttttttttttttttagaatttttacatctatattcatgggagagatgggctaataattttctcttcttacgatatccttcttagtttggggataaaggtcattctgtcctcatacaagttgaaaggtgctccctcttttagtggtccctggaacagcaaatatttatcctcctggaatattggatagaatccatcagtgaagccacctggacttgagttttcttcgtgggaaggtgttaaatcataaattcaatttactcaattgagtaaattgagtaatgagatcattcagatttttctactttggtaggttgtgttttttttctaagtttcatccgaattttcaaattcattggcataagagagtcattgtttatcatatcctcttctttttaatgtttgtaagatctgcgggcataacaaagtaccacagattgggtggcttaaacaatggaaatgtatttcttcacagtcctggaggctggaagtccatcagggtgtcagcagggttggtctcttctgacggcctctctccttggcttgaagatggccatcttcttccaatgtcttcacagagtcatccctctgtgtgtgtctgtgtcctgatctcttcttatatggacactagtcatattggattagggtccaccctgataacctcatttaatcttaattatctttttaaaggccctatttccacatatagtcacattctaaggtagtagaggttagggcttcaggatatgaatttggggggccacaattcagcccagaacatggggtgactgaatgtctcatatgctttgagtgtaagttgatagaaccactttgggaaatgattggacaacacgaaagctgaacagacacacattctgtaacccacggattcaattcctaggtgtatacgcaacacaaatgcacatgtgcacatcagaagacgtaggacaatgttcatggaggtgttcataatagccccaaactggaaactaaccacttctccaatggataaatcttggaatattcacacagtagaattttatggagtagcaaaaatgagttatcttttgctactgccaacataggtgaatctcatgaacataatgtggaatgacaagagccagatatgaaagaggaccatctgcacattccatggaattgcatttatatcaagttttctatcaaacaggcaaaactacttcatggtgtttgagggggagggagggtggagactgggataagaatcacaaggggacttctgttccttgatctgcgtgctagtcttgtgaaatttcagagctgtgcccttattagttccttgaaagaaaagtaaagcaaggccgggtgcagtggctcatgcctataatcccagcactttgggaggctgaggtgggaggattgcttgagccaggagttcaagatgagcctgggcaatatagtgagacccctgtctctataaaaaaaatgaaaaaaaaaatagccaggcacagtggtgcacacctgtagtctcagctactccggaggctgaggcaggaggatcacttgagcccaggagtttgaggctgcagtgagctatgatcatgcccctgtagtccacactgggctatagagcaaaatcctgtctcaaaaaaagagaaggaaagaaagaaaaagaaaaagaaagcacctcaaacaagcctgatactgatttgcaactcattaaacaacaaacacttttgtcagtacaatgcaagtatccatcttcttaggtccttgccaggcaggtggccaagaggtcaaatcagcgtgattctctccttgctgctgacagcgtttctaattcagctgctcatcaacagttctgaaaatttcccctaagggactacattttccatggtcagagaaacattaaattgactatttttagaaaaaggagctttgataagagactacttttcattatggaattgagaagaaagaattaggacagaaaacctgggtaaacgagacagaaatagacccaacaaacgtacccagatgtggtcttgatcccttaggaatccaaaactaatttataccacggattcttcttaaggatatggttctcttattcccagctgatttttaggagaatttcggtatgaggtgtccccagagctggccgagtctacagttgccattcccaagcccctcccttctcctctctcttcccggataccatggaaacccataatcaaaggcaacgccaacaactcctcttccttctcccacggggcagagctgagcgctcagagatgcagctttggatgaaaaatgagaaaaaaaaaaaagaaagaaaagaaactgagctcgctggagattcacccttgcaactcttaacaagatttggcatctgtgtacctcatgtgattctgggagaattctgtatcaaaaacagttttgtgtgtgtatgtgtgtgtgtgtgtgtgtgtgtgttttaatgacaatcttgacttgatgaatatcccagtaatcgaaggtgaggttttcctcatatgccggtgcctctttttcccttccctctaaggagagcaaactcctggcagatctcatgtgagtttttggaaataagtgtggctgttactaaatccatgcacaggagaacacattctactctcgggtggatcccactggctcttgtttgcacgtgttttggatggagaggccccttttaaaagataattcactaagcatgtcatttcggtgagttttacttaaatttcagttacagtaaaattctccccgcaggaacacatctcttgtcaagagaaaggaacttaacattttcctttgtaggagtctagctgcctctgtgagcacaaatcctatatatataatccttgaagagaaggtggagaggaggggaggagacatttcccaagggagtggctgtgattatacctacgatagcaggtggtaggagaaaaagtgaatttggcagttttcagagtaatacgacatctctagaaagccattctagatagtccaatctcatggcccattttgggggctttgatcctattgatgggactgtgtaagtctttggttccacatggccttctcactgtggcctcggctgtgctatttaaaatgtactttatcccacgcctgttcctctttagcctcctccgctttccacccccacgatacttaccaccttttaatacagcatgcactgctagtgggagtgtaaattagtcagaaataatagaaaacagcatggaggttcctcaacaaattaaaaatagcactaccataagatccaacaatcccaccagagggtacagatccaaaggaaatgaaatcggcatgtcaaagagatttctgtactcttatgtttattacagcattattcacaatggccgagatatggaatcaacctaagtgtccatcaatggatggatgaagaaaatgtggtatatatacacagtggaatactattcagccttaaaaaagaatgaaatcttgtcatttgcagcaacatggatgaactttgaggaccttatgttaaatgaaataagccaggcacagaaagacaaagtctatgtgaccttactcatatgtggagcctaaaaaagttgatgtggctgggcactctggctcatgcctgtaatcccagcattttgggaggccaaggcaggcatatcacctgagcacaggagtttgagaccagccgggacaacatggtgaaacccgtatctacaaaaaaatacaaaaattagccagctgcagtggagtgcgcccgtagtcccagctgctcaggaggctgaggcaggagaattgcttcaatctgggaggtggaggttgcagtgagctgagatcacaccactgcactccagcctgggcgacagagctagactctgtctcaaaaaaaaagctgatctcatagaagtagagagtagaatagtgattatcagagaagcagggggcagggggtgggggagataggaagagactgatacgaagttacagttagataggaggaataagttctcctatctattggtgatccattgcacagtaggatgattatgtttgtttagcaacattgtattgcatatttccaaatagctagaaaagagaattttgaatgctgtcaccacaaagaaatgataaatatatgaggtgacaaatatgctaaatatcctaatttgattattgtacgatgcatacatgtactgaaatatcacactgttcctcgtacatatgtgcaattattatatgttaattaacgcaaaaaaaataacacggtgtccagcttacctctgttttctattgtttgtggtctgtttcccctgctagaatgggaccccaggaaggcagggagtttcctctcttttatcccctggttcatactaaatgcttaggactgtgccttgcatacagtgagcactcaatagatacttgttggcagtttaaaaagtcagtaccttaattaaccaagtatcaaggcttttaatctttttgcctcaaatcaaactaaaaaccttgattaaaaagtcttaccctgtctctacaaaataatttttaaaaaattagctgggcatggtggcacctgcctgtaataccagttactcaggaggctgaggtgggaggatctctgagacccagaagagctgtgattgcacaactgctctccagcagcctgggcaacagagcaagaccccacctctaaagaaaaaacaaagtctttgctgttatccaaaaggataaaacagattttccagacagagggtcaagttgtgctatctttttccataatatcatttaaaacaaattattaagaaataagttttctaatatgaaattatacaaatcctggacattaaaaaattatgtctgcaatatttacatagcctatgatataaagcaaatttggggttaatcagtttctctaaagaacttaaagacacatttgtctttaatcatggcatgaagtgtctgatagaggaagatcatacgaaaaagtccacatctgattataattattaaactgtgtattaaacgcttggtatgtgccaggcatttttgcctaaattatctccaattttgccaacaacacttcaaggtaaatattaccatcctcagatgaaaaagttgggacccagaaagaagaaactggccaaggtcacatggatctcagatgaggacgtgggttcgctccactcccggatttctccccaaacagcgttctgggtttttcagagcacagtgcaatgcaatttcacatgtgtcattggtttcatattcgcagtcaacacacatgttttgagtaattgttatgttcctggcaccgtgcagcctttcttggagatcactgtaggaagcttggcatctcgctgggaggtactcgggaaccctgggcacatttcgggatgtgacagctgagtgagagccattgtagatgcctggggagttcggaagagggagggatcctcatgggctgggctcttgaagcctaatcatggtgtcccttggccttcccagccaggcaggggccattgttgggtctggctgcctggctgctgcatccccttgcaggggcacctcagtcctcaggagcagtgacctgtcccgtaccatgtggtcttggcagagaggtaacttcagatccatgtctcccactgtcccccgctgcccccctggcctctgtggaagctggagaggccaatcctccttctctgggatgctggggaccggggcctgtgacccatactcagacaatttcaggtccagtccactgcccagaccttggatcttaaagatggtggagcatctgctcacaaggatggcggggcatccataggcagtgatggccatggcgggaagaggccataacggaagatatctggctgtatctccaactggctgttcctaagatgaggcggtgaccaagttccctgagaacaggattgtcttccagctcccaccaaatgtgtgagcctacaatagcttcccaatcaactccttttgaattaatacaatcttaaacctgttgtccagcctatactggaaaagtaagctttttcctttaccctttatccgaaattcaacatggatggatataggtcatgaaaagacgttctgcggacaatcacagaatcagaaggtgaaatctgcttttaaggagtttttctttacctactctgatgctttctccacaggctgatgaaggctgcctgattcttacttaacaaagctgggaaatttcatcagcctgggcaatatagtgaggccctgtctctacgaaaagaaaataaatacaactttaaaaattagtcaggcatgaggtgagaggatcggtgaaacccaggagttcaaggttacagtgagctaccattgcaccactgcactccagcctggccgacagagcaagaccctgtctccaaaaatagttatcataataaaacgctaggaggtttcagtgttttcttcattcttccgaagctagggaatcacacaccaggacaagagagagagcccatcaatttgccatgggagagctcaggctttccgggttgggctggggttctggctgaggcatcaggagctgggcatcaaggccctgggctccctgctgggtttgatctgtggactgatgcagggagaggctttcctgtattttggcccagagcacatgatcttatctgcaaaaccgcagcactgtgcctggtgctgaaaccatgagagaattaagcctcgatgacccagttactggacaatgctgtccagctccaggactgctcgttgcttccacagtatgatgtgttaattcgctgactgtattttcagagtccatccactgccctaaactctctgcacccacagttccaatggggagcagtaacttcagttcatcaaagccaattattccagttcttctttttcagcttggatttttccatttcaagtcgtcatgggaaagtaagtcttaataaatccctttatgcacggagaactagggcaattactgacattttaagaattattgaaacttttttaaagttttttgattaaagttctaaaggacataaataatccttttttggtttttggaagggcttcaattattttcaaggacagaagttgggcacacgggctgttcaaatctaattaattatctggctgcgcccacaaaagtcacaccttcaaaacactgaggttacagctaatcatctgagattctcccacactgggataactgtacccaccctctggggccatgacagatacaagtacaggatgcgttataggaactcaaggtgcacctctgcagggaaatcaagttttgtttgtttgtgactcaacgatttagtcgtgcattaaatattcaatatctgatgcaagagatttaaaatcctgaggtggtaccttgaagcaaaaaacacacaggctgggttaaccaatcacattaatatttttataccataaattagattagaaatcccacagctgggaaaagccagggtggaaagatcccagggaatgatgtggctccgaaaaatcagtggtgagcaaacttcatgaggctggataggggtctgttttggtttaggatcaataggaaactgaaggcaggtaacctttgaccattggagagacatacccatgccaaccagagttcactggagttgatttactgcactacggtatgctctaaaaataagcacatagtttgactgaaacttgcatttgagttaaaaaaaaaaaacaaactattgtttttagtttaccatgcattggtaaatttcgaaagaggataagagctgggcaggaggatcacttgtgggtgggagttcgagaccagcctgggcaacatagcaagaccctatcttcaaaaaattaaaataacttcgttgggcgtaatggtgtatgcttgtagtcccaacactttggaaggttgaggtggggagatccttgagacttggagttcaagactagcctgggcaacacagcaagatcctgtgtctacaaaaatttttttaaaaacttagccagacatgatgatttgcacctgtagtctcagctacttgggaagcggaggtgggaagatcacttgagcccaggagtttgaggctgcagtgagccgtgatcgtggcactgcactccagctgggcaatagatcaagacctagactctaaatacataaataaaaataggataagagaaaaaatacttgactttgaaacctctattggaaaagctgcagaggtcatctgtaataaggcaaaggagagaatggagcagccacacctccgtcattgctgaaagccaaattctttctattgactccagaagaagacatattacgccagttttttaaagctgccatatgtcttatcagagtcacagttgagtagtggtatgtaggtctacggtacaaatacaaaaataagtgtttgagcaggtcacaacatgcccacacaccgtcaactgcatcttttctttggcagaggagtctggaattcacggctccaaggaaacaactgtttgtcaatccaaaccttggatgccgatactggtgggcggctcagtgatgacgttcctgtgtgactcaagtggtttctaaaaggcaagaagccatccccgtgaggcatacggtgaccagtgctgaatcttccaacaccatttcccacagggatcagttgcagtcaagagaatctgtttttttcagaggaggatgccctgtgtgagggaagagaggggtgagcagctgaaggaaggtgaatggacagaaaagctggacacactggccagactggggaggggggtgggggctcatgcctgtaatcccagcactttgggaggcccgggggacagatcgcttgagcccaggagtccaaggccagcctgggcaacatagtgagaccctgtctctacaaaaaaaatacaaaaagtagttgggtgtggtggtgcacacctgtagtcacagctactcaggaggctgagaggtgggaggatcacttgagcccaggatgtcaaggctgcaatgagctgagatcacgccactgcattccagcctgggcagcaaagggagacctggacttaaaaaaaaaagaaaaagaaaaagaaaaagttggacacggcaggccaaaagactgagttctacttgatcattgttgttgaatctgggagaagtggtatttggacccgaatgcctgagagcaagtataatactgccaacaggggctatgacttggctacaaatggctttaaactgaagttgccagtgtgtgccccctactctgtgtgtgccccctactctgaaacctctggcagcacctcatctttctgaggatgggcagggagcagggccgccgctaactccgtatctcagttgcccaacttgttccgaaaggccctcgacttttcgccttcaccttttcagtgatcagatacagaaattcatgtgacgaaaccaattgctgatgaaaagttcatttgccaaaggtcctcattatcctagaacagatagaatggcgataacaaaaaaggaattggagtgaatccacttaaaacaggaacccatattgcatatacagtgaaagaagatatgattggagctttgccttgagaattaaacaagcattacaaaaagtcagttttattttatatttcagaaaactaggttatagctgcaattatgcattgttcttaaaaatcagtgacgaatgagtcaagtgttgatgggggaaagctctgatgaaggcacgtgatgaaggcatgtgatgatattctatggatttcccgttggactgtcacagtgtaatcacaaagacagccactttattaattttccgaagagcatccgaatcctctgctattaaactcattctctttcatgtcagtatcctgtatccaccgatttctcttctacagttgttaacctgtctgaatcttgtctcattcacctgtcaatggctttgctcctgatacaagcaatcaatatggctttcacaggctgtgtataatctggcttcttctgcaatttcacttatggtagacctatcttatgtgtcttgcatcccactccattgctaggaagagactgagccctcagaatggtcacatggtaggcaaaatggctcccctattgggtcaggtacaaataaagctttgactataacctcaaattgtaatatatactgttcacatcactcttttttttttttttttttgagacggagtctcgctccgtcgcccaggctggagtgcagaggcgcagtctcagctcactgcaagctccgcctcccgggttcacgccattctcctgcctcagcctcccgagtagctgggactacaggtgcccgccaccacacccggctaatttttttgtatttttagtatagacagggtttcaccgtgttagccaggatggtctcaatcttttgacctcgtgatctgcctgcctcggcctcccaaagtgttgggattacaggcgtgagccaccacacccggcctgttcacatcattcttttgtcttttttattttttatttttttatagagatggggtcttgctatgttgcccaggctgatcttcacctcctgggctcaagccgtccactcaccttggcctcccaaagttctgggattataggtatgagccactgtgcccggccctcatcattcttttctaaacataattgaaattgccatattatatctgaaagatttattatactccaaataattttcttttttagacggagttttgcttttattgcccaggctggagtgcaatggcatggtctcagctcactgcaacctctgcctcccagattatcctgcctcagcctgctgagtagctgagattacaggcacatgccaccacgctgggctaatttttgtatttttagtagagacggggtttcaccatgttggccaggctggtctcgagctcctgacctcagatgatccgcctgcctcagcctcccaaagttctggggttacagacgtaagccactgtgtccgacctccaaaagatttttaaaagatgatttctcttttgattggcaagttatttgattatttaaaagatcctttttattgcattttggacaatgaaagtcctacttttttggaatatattaacttttctttattgcttaaggtaaaattcttttgtgtgtgaatgttctatcgatacttaaaaagaatgtatattatttgacctatacagcattaatgtattttctctattaaatcatgttgtatgttgttattcagatcttccttgtctattttaaaaaacagacttatgaagatataatttatatacaattcaatgatttaaggtatgcagttcaatgttttttggtgcattcacagagtcatgtagcaatcactgtattgtaatttagcctaacttaccaaagtctttgcagatttataacgacttagttccagtgaaatatagaatcctgaatagctccattatactcccttctaatgctattattatgcattatagtataatagtatttatgcatttttaatagcattcctgcattattattgtttatgctaatatgttatacatattattatacatattatgtttctatatgttaaaaacccaacaattctttggtatcattaatgcattaggtagtctgaagtcttttaaagaaactgagagaagaaaggagaaaaagtatatctacacagttgggcacggtggcacatgcctgtaatcccagcactttgggaggccaaggagagtggatggcttgagtccaggagttggagatcagcctgggcaacatagtgaaaccctgtctctacgaaaaatatgaaaattagccaggtgtggtggcacgtacgtctatagtcccagctacttgggagactgaggttggaggatcgcttgagcccaggaggtcaaggctgcactgagctgtgattgtaccactgcactcctgtctggtgacagagcaagaccctgtctcaaaagtatatctatagagttttaaaattttatttatttatttatttatttatttatttatttatttattgagatggagttttgctcttgacgcccaggctgcagtgcagtggtgggatctcggctcactgcaacctctgcctcctggattcaagagattctcatgcctcagcctcccaagtagctgggattacaggcacccaccatctcgcctggctaatttttgtgtttttagtaaaggtggggtttcaccttgttggccaggctgatctcgaacacctgacctcaggtgatccacccgcctcggcctcccaaagtaatgggattacagtgtgagccaccatgcccggccactaccttttaatttacccattccggttgtctttgtttattgctatagtttcagctaccatctcatgtcctttccttttcccagtatagctttgctctcaccttccatgtagcatcagtgtcaagtacactgtatttcagtagattatagccccaacaacacaattatatacacattgttctatgaaattactttataaatcagttaaaataagaaaggagaagaaggtcagacatggtggctcaaaccggtaatccctgcactttgggaggctaaggcaagaggttcacttgaggtcaagaattcgagaccagcctgggcaacatggtgagaccccatctctacaaatttttttttttttgagatggagtctcgctctgtcacccaggctggagtgcagtggcgtgatcttggctcactgcaagctccgcctctcaggttcatgccattctcctgcctcagcctcccaagtagctgggactataggcgcctgccaccacgcctggctcattttttgtatttttagaagagactggtttcaccgtattaaccaggatggtctggatctcttgatccacccacctcggcctcccagagtgctgggattacaggtgtgagccaccacacccggcctctacaaaatttttttaaaaaattagccaggtgtggtggtgcgcatctgtggtcccagctatttggaagggtgaggtgggaggattgcttgagcccaggaggttgagactgcagtgagccgtgtttgcaccaccacacttctgcttaggtgacagggttagaccctgtctcaaaaaaaagagagaagaaatatacaattatatactgtcttttgtaatttctacataatttcctttaccaatgttctttgtatgtgtgtattgtgtgtttgtgtatgttgtgtgtgtgtgcatgttcacattactgtctggagtcacttgctttctgcctgaacacttcttgtcaagcaggtgtgctatcaacaaattcaggttttgtttatctgggaatatctttatcttgccttcgtttttaagagagaattttgctggatataagatgcttgctagatgaaattttattttcagcactttgactgtatcaacccactgcctctggcttccattgtttctgatgaaaagactgctgttaatcttactgggaactctttacatgtgacatgttgtttgctcctgttgcttctaagatttttctttgtcttgcagcatctttaccgtaatatatctggatgtggatctctttgtttggcatacttggaatttgttgagcttcttggctgtgtagattaatgtttttcatcaaatatgagaagtttcaacctttgtttctttgagtacattgatgcttctgcctttcctctttacctgctaattcttctgtgtgtattttggtgcatataatggcatctcacatcttcctgaggctttgataatttttctttctgctcttcatttttttaattccctgtacttatgattggataatctatattgatctagcctcaatttcactgatttgctccggccagctcaaacctgctgttgaatctctctagtgaagttttaatttttttaaattttgcttttcaattctagaatttctatgggtttctgtttaaataattttgtctttttcttgatgttctctgtttgatgatatgttgttatcatcctttcttttagttctttaagcatggtttcctttagttctttaaggatgtttatagtagctgctttgaaggtttttatgctatttcaccatctgggctccctcaatttcatgtatttttaagtatttttctccctggcctgtcaaagaatgagaggtatattaaggtatcccactaaaaatgtgttttgtacatttttttcttcaggttcctaacttgcatttaaaaaattttgttgatgttagtaggtgtatagttttctattatggtattattaaatattgagcaggtataaattaacattcataaaataggagttaaatattaatggcataacaaatatctgagtttctacccattgcatttgagaaaacacattatcacaaattttttccctttttattttgaaaaatgaatttggaggatttatactaccagatgtcaaaccttattattatgtttaccatagcatattattatgctatcataaaagactgtgatattagcactagtgtagacagaccattgtaacaaaacagagagtctagaaataaatccacacatatatggccacttaatttataattaaggagacaaatgcagagtggtagacttgatgtatagaagctcatatattaatagtaaccccgtacgtgttatacatgttacaaatgttttctcccatttggtagtttattctttaaccctttaacttaaacctctacttttttcttaatagctgtagagtgtaataacaaagaaaaaaaactcttttttcttttggtcacacagagtttatttatttattatttttattttatttttttgagactgggtctcactctgtcactcaggctggaattcattggtgggattaccgctcactacagcctcgacctccccagggtcaggttatcctcccaccccagccttctgagtagtggggactacaggcacacgccactatccctggctactttttgtatttttttgtatagacagggttttactattttggccaggctgttcttgaactcctgggctcaagtgatctgcctgccttggcctcccaaagtgctgggattacaggcaggagccaccgtgcccggcctactttttaattttaggtggtcaaatatgttgcttgttcttttttggatcctaggtctcatgagatcattactagaactttctctaacccaagtttataaaaatatttccctctaatgatacaaaaagggctttttaaatacttagatcttaattttcattcagaacttattttcatgcacaatgcatggtaggtgtctaacaacagcaaattgtcactttaccatttattgactaagcctttcttcccccagtaacttagagggccaaatttttatcctgtacattcccacatgtaactgtctgtgctttggggctgtctgttctgttccactggtttatttgccaactcttgggccaatatcacattcttttaataaatataacttactactatatttagagttgtgctagaacagtgtctcttcatagtttttttccccaagcctttcaaatccagatgcactggcctaggccaggcaaagctcctaagtcagattccaagaaatatctttgatggtagtgttcctagaaacaaccacacaaatacactggacataattctatctccagccccatgctgccctgaagtctcactttttcgtggtcagctctttttttttttttttagatggagtctcactttttcacccaggctggagtgcagtggcatgatctctgctcactgcaaactccgcctcctgggttcaaatggttctcctgcctcagcctcccgagtagctgggattacaggtgcctgccaccacactgggataaattttgtatttttagtagagacagggtttcaccaagttggccaggctggtctcgaactcctgacctcaagtgatctgctggcctcggcctgtcgaagtcctgggattacaggtataagccaccatgactggcccagggtcagctcattctttctactattcttcttagctctcatttcacacttaactctctctgtaaatcaccatctctccatttcctcctccaggatgaactttccttctattttacagagcaaaacccatgatatagaaaccccttaactttctaatggcaaacctaaaaacttacacttagatccatctgtttctttccctattattaaaataagagtagagtcctgccctctctcttcctcctaagctaaagtaagctctattgagtgagatctggtttcctcccatacccttaggatacagctcggctctgtcctccctgtctgtgtttaaacatgcccgtccctcccactcgaacacacacatgttcacgcacacatctttaggctccagattctcctgcagccatcttgctatctcctctcgttcaaagctacacttctagaaaaagttgtctaactcattgtttcttctctcattcatttctcagcctactgcaagggccgctggtcacttccttactgttaaatctttactaatattcctgtctccagtcttgctctcctctaaactgtttctcaccatagaagccagaataatccttttaagatgcaaatttggatatatgattcccctccttaaaagctttcatgacttcttattgatctcaagatccagactccttgacaaggcctccgcctccagtcttctcaatcccatgagccctttccaatcctaaatcctggccacaccaagcctttccctgcccctggcttcctcactatgcgatcacctggtctttcattccgcacgtttgcctggctagctcctactcaccttcagtactccagcaagaagacgcgagtgaccaccctaccactccttcccccaccccaagaccacatgaaacacccctactttgtattctcccggcacccagcgcttattcccactacgtggaacattccttacactgtttacttctctctctctccaactagatggaagacactctgacaaacggggtcatttcttaattattatttaactccaacatttagccaagtgcctatcgcacagaagatggattatggctatccgaaatgaacgaatagctcctctattagccacagaactcagcatcacctgtgaccttttgttttaactaaagctattcactcattcgttcatcttattgcggtaaaaacacatatcataaaatgtaccatcttagccatttttaagtatacagctcagtagtgttaagtgtatttacattgttgtgaagcagaactccagaacgttttcatcttgcggaactgaaactctgcacccactaaatgattccccatctctctcctgctcccaggccctggtaacccccattctgctgcctctacgaatttgactgtgttaatacctcctatactgaaatcatttggtatttgtccttttatgcctggcttattttattcaacgtttatccaggttgtggcaagtgatgggatttccttcctttttaaggctgcatagtattccattgtgtgtatatactatattttatctgttcacctgtgaacatccgtgaacatcatatttttacctgtctgtgactttttatgatgattttctatagtatttagaattttggattttttgcaagtttctgattccacaacattcaaatatactattacaaagaatacatgcaaatatatgctttctataaatacaaagggctttttaaaatagaagcttttgttactatcataaagttgttcacactttttgaaataagaagctctttttgttcaaatgttttatattttaacatatatttcactgtatcagtccttttttttttctccacaaaaacactttttatttgaggcaaagagaagtcttgctgaagggattacagttccaagcagccaaaactcaactgttagtggcactattttgacctggtagatgttgcttctctttggtcagaaaagggtattcaggttgtactttccccagtggggcaaaaaggagggcaaagcaaactggaagagacttctactctattgacagggctcttcagatccaacatcaagctagacatgcccttgctggccactctacaggttgctgtcccactgctgagtgacacaggccatgctacatttgcaaggaaaaaaatgagacaggaaacacaggtataggtcacttagggatgagcaggcatccacagcttcaaaactcttcatggaaggggtaatccttgtgggaggcacagctcaccaaggcacagactctccaattcctgttgtagctgagtaaggcggtcatatcctggctgttcagttcaaagtcaaaaaccttaaagttgtcagcaatgagttctggtgtcacagacttggggatcacacccaaattcctctgcatggggaaccggatcaggacctgggctgtagttttattgtgcttggctgcaatcgccttgatcctgggatccctcaggagggaagggtcctcggggttgacccagggcctgctgggagtgccaacggggctataggcggtcaccacgatgcctttggactggcagtactggattaacttctcctgagtgaggtaagggtggcactcaatctggttaaccacaggcttatactttaagccaggtttgtttaagagcctctccacttggaggtggttgaagttggagatgccaatagctttcatcagccattcatccaccagctcttccatggctgcccatgtgtccagaatgttggtgtcactgggaaccacattacccaactcattcaatggaaaaattccctcccaggcttaaagccagtcggccaatgaataaggtagaggtccaggtagtccagcttcaggctgctgagggtcttctggcaggctcccttcaccaggcccttcccatggtatgtgcaccacagcttactaacgatgaagagctcctcacgctttaccacctgctccctgagcttctcctgaatggccacccccacctcattctcatgctagtacacgtgggcacagtcaatgtggcagtacccgacattgatggccacattcacggcctcagtcacccggcctggaggggacttccaggtgcccagccccaggatgggcatcttggtgccattgttgagcacaaggtggctggccatggctgctgcgctccctggaattgtttcatactgtcttgtgtgccttggaagacttatctcctgttctctgccatgctaaccagtgctatgtataaccctgcctagtacagggtggtgagggaggggtgcctgtctcttcagcacaaggctacttccactccccactcccagcaaaagctgatctgaccggaacaatgatcaaaagtaggaaaataacattggccaggtgcagtggctcatacctgtaatcccagcactttggaaggccgaggcaggaggactgtttgagcctgggagtttgagaccagcctgggcaacatagcaaaaccccgtctctacaaaaaatttaaaaattagccaggtgtggtggcacatgcctgtagccccagctacttgggtggtggaggtgagaggatcccttgagcccaggagagccaagattgccccactgcactccagcctgggcaacagagcaggaccctggctcaaacaaacaaacaaacaaaaccaaaaaacccaaacccaccaaaaaaaaaaagacaaaaaaaaattaaggaaaataacattgacataatactattaacagacttacagatccaatctgattattttctcgttttcccactgatgtcctttctgttccagaatccattctagcagcctatgggacattgttgtcatgtccccttcatctcctccactacagagcagtttctcagcctttcttcatttttcatgatgatatttttgaacagtactggcagctatttcatagaatgttcctcagcttgagtttctatgatatttcctcatgatcggattgagactgtgtatttggcaagaatgccacatgggagtgagactgtgcacttcttggtgcattgcagcagggggtccgtgatgtctccgtgttttattgctggtgatgtgaactgtgatcacttaggctaagatggtgtcttccaggtgcaccactgcgcccagctaatttttaaatacgttttgtagagaaaaggtcttgctatgttggccaggctggtctcaaactcctggcatcaagtgatcctcttgcctcggcctcccaaagtgctgggattacagatctgagccatcatccggcaactctctcactgtttctacccagttcccatatacctcttgtaggtaaccatctcattagcctctgatttattcttcctgtacttcttttgcagatatgatcccctgcccaagtttgatggtaaatcaacaggtgcagcagccaagacttgagaaggacatggtaatagagcatgcagatttctcagacatgaaggtgtgggtcaccccacaggtgaactacttagaccaggagaggtgtgctagccaagggtgagggaatctcgaatgggtagtaggggaggcagatgatgaaaaccagctatagccttgaggtcagctgtagcagtaggagctgctgttcatccttcatcccactagctgtcctcttggaggcttctccaggaaaggaggccatccagaatcccagagaagctgttcactgatgggattaacttactacgtgtaagtaagaagtggatccgagtgacgcaagaagtggattgcagtggaggtcattgtgtgcctcccagatcccacattcaggttggagggacccatttccccagctgtgttttctaaagtctcataggtacatagcacagtaatatgtatatacaacagagtcttgccaagcacaggggctcatgcctgtaatccccatttgtggggcttaggtgggaggatcacttgagcctaggaattcaggaccagcttggcaacatattgagaccctgtctttacaaaaaattgaaaaattagccaggcatggtggtccacaactgtagtcccagctactcaggagactgaaacaggagtctctcttaactcttcagcccaggaggtcaaagctgtagtagcaggccatgatggtgtcactgcactccagcctgagtgacagagcaagaccctgtctctaaagcacacacacacacacacacacacacacacacacacacacacacagagagagagagagaaagagagacaatcttctctataagaacaaagtatacacacaggccaggactgagactggagtttggggaatgggaaggatttggatatatggaattgggaggaaatggcccaccagatggcatatcagaatgaggcgggcatttccagcttttcttgatcatcctccacctccctctccctagaaggaagaatcctcctccttccctctcccacttccctctgccctagacacactccgatctcacaagccattctggctgctgcgacttttagttttatccgtcgtctagctgagattaaactggaatgttccatttgctcttttggctctcaagtaggctcagggcttcccacctatgggtgcagttggatctttttcactgtaacagaacaaatgctctgacctccaccacaaagtgtttctgagggtgcccggccttagtgagttcctgggcaccccccataatgtacccaggccattcatatttaaggcccccaaagtctcctgagggcttcagtggagcctctgcttcagctccttcttcttcttcttcacaaagttgatacccctatgccaagggcacggattcctgatttttacaagaatcacttcctagaggcatcaaagtggtttctgcattcactccagttcccacttggctgaaggcacaggggatcgttcacggaggtcggggggaaagtcactctctttgtaaggactacaaaacagcacttgtctctccccaaatcccagtttcttctgcacctcagttcccccccagaaacctctgcaaaggaaagacaacaaccccaccttcctcttccagccaaaaccccaacatttatgcaaatagactggcgactccacctgctaaacccaagtcaatatgaatcccagttgaggctgacacaggaactgattattaccgtgggaatctaaacgaaaaataagatgaaaaaggagcagtcacggcggcctaggagtggacgcagattcctgacgctaagcacagggattctaggccacaagcccacctggcctggctgtgtctccttggccctgtctcatctgttgggcaccagctcccccctgcccccttctccagccccttggcttggtcctcacaggactcccagaacttgggacagggcctggctcagagcaggaattcaatcaacatctattgactgagacagatgaaagagaataggagaatgagtgccagggacaaccatgtccctctgtctgggaagcttctcatttccttctcagctcagtcttgtggcttccaggggttgacctggtgtttggaccttcagcggaggatggggcttccccactagacccaaaaatggtgtcctgggcttctccgtcaccctgcagtctcaaagtggacccctccacctccccttccttctttctatccctctctcctcctggaggagctcctgtagatctactctccctctctgctccatttctctgcatgatttgggtttgcctggcagaagcacagtcaccgctcgtggactgagggagggagtggggcctgaggctcttctgctgctttcttctttacccatttggctaaaatctggcctgggttgttaatgttttaaaacagtactgttttaggttaatgttaagactgcaatgcatcccaaatacttaaaaaaatttctcagaactattttatttttaattaattattgtaagagatagggtctcggtctgttgcccaggttggagtgggatggcactatcgcagctcactgtagcctcgaccttctaggctcaagccaccctcccgcctcagtcttccaagtagctgggaccacaggcacacgcccatgctcggctaatttttaatttttttttgtagagatggggcctcactatgttggccaggctggtctcaaacttgacctcaagcaatcctcccacctcagcctcccaaagtgctaggattacaggcactgtgcatgactcaaaacaacttaagatttataaaaaattgagaaggaggtatagatttcccagtttcacctattactaacaccttacattcatatatttgttatagttaacgaagatatattgatacattatcattaattgaagtccattattaaatattgcccgtacttcaaatctggatttccttagtttctaatatcctctttctgtttcaggatcccatctaggataccacatcacatttagtcatcatgtctctttaggatcctctagaccaggtgtccctatttcctgagccacagacccattagcaaccgggctgcccagcaggagatgagtggcaggtgagcaaaagttactgcctgaactctgcctcctgtcttatcagcagcggcattagactcgcacaggagcacaaaccctatcgtgaactgtgcatacaagggatccaggttgcacgctccttataagactctaatgcctgatgatctgaggtaggacagttgcatcccgaaatgatctctcctcccctcctgctccctatctgtggaaaaactgtcgtccatgaaattggtccctcttgccaaaaagattggggactgctgctctagactgtgatactttgtctgactttccttgttttgatgatcttgacggttttgcgaagtcttaggtaggtattttacaaaatgctgctctattggaatttggtgtttttcttagactggggttatgagttctcaggaggaagaccaaagggtaaagggccattttcatcttatcttatcaaggatacttgctatcaacacggtttatgactgctgatgtggacttcgatcacctgctagtctttgtcaggtttctgcaccataaagttactctttcttctcctccatattctacgcttcgaaaggaagtcactgtgtagcccacagttaagaatcagggagtgtagctctccagcctgagggcagactatcaattattttgagttctgcatgggagatttgcctcttctctgtcatttatacatttattccatcatttattaacatccgtagggactcatggatattcatctcatactttgggttataatccaatactacgttatttgttttgccactcaaatagttccagctttgggcactgggggcactttcatttggctcctgtggccctttgatatagtcttatggatggaatgtttatgtctccccaaattcatatgttgaagccctgccccacatgtgatgatatttggagatggggtctttgggaggtaatcaaggttaagatgaggtcatggggtggggcactcgggatgggattagtacccttatatgaagacatgctggagaattcggtctctccccacacagactccccaacaagtgcacaaagaagagatcatgtgagcacacggggatattgcagctacctccatgccaagaaaagaggcttcagagtaaaatttacctcgccagcaccttgatcttggacttcccagcctccggaccatgagaaacaaagttgtgttgtttacgccctcaagtctatggtattttgtcatggcagcctcagctgactgagacacacctccccaattgcttcactttctgaggacttccttactttctggcactgcaagatgttccaggctcaccttgtatatttcctgccccagccctagaatcagccacttctgtaaggagccggctcctgttattggagaatagtattggaaaccaacaacaggctcctaggtagcaaattattcttggatggacacactagaaaacagttattttgtgcctcctatgtgccaggcactatgctagctccttttcatgttggtttacttaatcctcataacaattctatgaaatatttactgtcaatcctccccagatgaggactggaggtgtagctgggttgagtgctagccaacaccactctgttctgtctccaaagcccatcacactgccttgataaagactggtgtcacatacctcacaaacaccatgttttttttttttttttttttttgagacagattctcgctctgtcacccaggctggagtgcagtggcgctatctcagctcactgcaacctctgcctcctgggttcacgccattctcctgcctcagcctcccaagtagctgggattacaggcgtgtgtcaccatgccgggctaatttttgtatttttagtagagatggggttttgccatgttgcccaggctggtctcgaattcctggcctcaagtgatcccagatggcacacatctctccttatgtgcaaagatgacagccacctgtgtgtgcacagatgcatgcagctctcctcatgtgtgcaggtgatatgtacctatttgcatgtgctcacatacctttgtgtgcagagatgacatgtacttatccttaagacagatgatgtgtctcaactcatggaataatgaaatctgacaaactgaaaagtgctttagaatggacattcacagtacttgccaactgctcaagcttagaccgtgtcagattttttgctatcatccataggactcccttatgagatgtgggtatgttctaagacaaacacttagcatcacagctgttaggatttcaaacagtgcttccagagataaaactggaggtttacattttgccctcaagcatggggatcatatcacacaagaaagaacagattagtcagccagggtgagtaaggcttccatcagagcgaccacagtgtgatctgccacttgaaatgcctattgatgggtttgtctgcccagcacttctttttcctccgagatcagcccctgccaacctctccagagcagccatgttcatccatcatgacctgcttttaacacttgatcattcctagatgagcacgtgacccagctgtgccaatccaagagtccttgcctaggactgttggaacaggaacttaaaatgagagttggcccttctttagggactgaagctgtgaacactgagattgtcattggccgtgtgaagaaggtttatgtgccagcagaaagcataatgaaatcaacaggaagacacatacacacttacacacacacacatacacacagagagagagagagagagagagacaaagacatctgttcttggttctgacatgacctgggtatttcatggagtggcctagcatctttcaccaagggcttgcttaatgcttaggctagtcagggatggttttcacttacttccaaccaaagagcctttaccaatgcagaatgattgataatcatattatcaccaacatactgcaagacatcaactgaaactcaaatctgacggacattttcccagctctcaaatattacagatacagtctggatctcctgtcaaaggtggttaacttggctgtttagtttttcagaaactttccaaatatacattaatttatttcagtttgcatagtaaacttctattgatctggctttcaaatacaaaaaaatcaaattactaaattgttcctccactctaccttgtggaaacaaatgaaataaggtgtggtaactaaggaactgctctaaaaataacaccttttaggatacaacatagggtcaacatcatgaccttcaatattttgtgtgtttagtgcctgaatcagcaaagcagtataagcacagcttggcctcattttgcagtgtgttttagtctactatgattctatggatgcaatttgtttataattcatgtatgagcatcgtggtaataatagctaatactttttttattttttgagactgagtctcgcttggtttcccaggccgatctaggctcactgcaatctctgcctcccgggctcatgtgatcctcccacctcagcctcctgagtagctgggaccataggcacatgccacccatcacacccagtactttgggagaccgaggtgggagaatcataagcccaggagtttgagactggccgggacaacatagtgagactccatctctaaaaatatttcatctctcaaaaaattttaaaaataaaccaggtgtggtgatgcacgtctgtagtcctaactacttgggaggctgaggtgggaggactgcatgagcccaggagttcaaggctgcagtgagctatgctcatgccattgcactccagctttagcctcccaaagtggtgggattacaggagtgagccactctagccagccatgtagctaatacttttgaggtaccaagcaggcactgttttaggggtctagcacactaattcctttaatcctcagagcgacactgttgtcttctccatttacagatgacagagaggttaagtaatttggccaaggctgcacatctagcaagcggtgaagctgtggacactagtgttcatatctcttaggtaactaatgtagttaatcatagtggctgtcaggtaactacaatattcaatgaatacaacagcctacttcccaagtcctttggagggtttttttattttaaatttttttaaattaaatagagatgaggggtctcactatgttgcccaagctggtcttgaactcctggcttcaagtgatcctctcacctcggcctcccaaagtgctatagaggctactcagtctttggatttgtagaatatatattgattactgtaaggcagagagatatgcaggaaatttttcttttactgtgatggcttggatccctgtgacttgtaaaaaaagctacatagtagacctccaaggcttcaccaggctctcgtttccttatggagaacaaatctttcggaagcttctatctcttagggtaaaaatctgaatgtttcttgggcccacatggccctgcctatcttgttggtctccactttactttcagccactttagccttaaatttctcccatcacagggccccggacaagaattccctgtgactgctgcacccacgtcctctgtattgcctagccaaatcctgtcaatttttcaggcttccccggacccatcagactaggtctggttcgcttctgatttctcacagcgtcttgtactgctttcttgtagtatctatgaaaatggtaattgaaaaattgtggaccaggggaggtagctcatgcctgtaatcctagcactttaaaaggccgaggtgggtgcatcacttgacctcagctgttcgaaaccagcctgggcaacatggtgaaaccctattgctacaaaaaatacaaaaattagccaagcatggtggcgcatgccttgtagtcccagttgcttgggaggctgaggtgggaggatcacctgagcccaggaggtccaggctgcagtgagccatgcttgccccactgcactccagcataggtgacagaaagaaaaattgtgtaattaccaaacgcctgtctgcctggctgtaagtgtaagttccatgtgggcagtgactgtgtgtttgtcttgctcattgctgaatctccaacacttagcctacggcttagtacatagttggcaccaaatgcatacttgtaaactgagtagaagaaaaactaccagctaccagctgaaaagaaaataaatacccgagtgtcctgggcactgactagacttgctgggtgtgtaagaaggcctgcccagacacagatacaaagaatgctggaacagcttggcagggcggtttgcaaaccaaaggataactgaatatacctatgcaagttcttttttttccccttacacatttttcttttttcttttctttccttttttatttttatttttttatttttgagatggagtcttgctgtcacccaggctggagtgcagtggcgtgatctcagctcactgccaacatttgcctcccgagttcaagcaattcttctgcctcaggctcccgagtggctgggattacaggcacccgccaccacgcctggctaatttttatatttttagtagagacagggttccaccatgttggccagggtggtctcaaactcctgacctcaggtgatccgcctgcctcggcctcccaaagtgctgggattacaggcgtgagccactgtgtctggcccccttacacattttttaagtgattaggaaatattcagggtaaaattatgattttgtgagcaataaatcacaatcctattttaatagtactaaaatcttgatcaaagcaagttcaggcaggacttggttactcacacccttaatcccagcaatctgggaggccgagacagaaagatcacttgagcccaggagtttgagaccagagtggacaatatggtgagaccttgtctctacaaaacatttttaaaaaattagctaggtgtggtggtgcatgcctgtaatcccacctacttgggaggctgaggtgggaggatggcttgagcccaggaagtcgaggctgcagtgagctgtgatcaagctgtggcagtgccattgcactccagctggggcaacacagcaagatcgtctcaaaaaaaaagaagaaaagaaatttaagctgagaatactgagagccaacgtgaagaaacacacttgtttcaatgacacttattctcctaagtgtgcatctgtgagcattattacctgtttttttttttttggagacagggatctcattctgtggctcaggctggagtgcagtggctcaatctcagctcactgcaacctccgcctctcaggctcaagccatcctcccatctcagactccagagtagctgggaccacaggcacagcgccaccacacccggctaatcttctgtatttttggtagagatggggtttttccatgttgcccaggctggtctctaattcccgacctgaagtgatcagcctgcctcggcctcgcagagtgctgggattacagacctgagccaccgcgcccagcccattgttcaccgttgtgaccccttttaatttttatttattgctttatcatcttactgattcctcgaaacaatcttacggggcgagccggttccatgggcgctgaagaaacatttcctctttcaaagcctcaattgtttgaacgatacgcgttgctaaagaggaagcaattaaacctatcaggcgagttctgccctccgcccagcgagctgctgcttcctggtgttaaaacgctttcggggccaggcgcggtggctcacgcctgtaatcccagcactttgggaggccgaggcgggcggatcacgaggtcagaagatcgagaccatcccggctaaaacggtgaaaccccgtctctactaaaaaaatacaaaaaattagccgggcgtagtggcgggcgcctgtagtcccagctacttgggaggctgaggcaggagaatggcgtgaacccgggaggcggagcttgcagtgagccgagattgcgccactgcactccagcctgggcgacagagcgagactccgtctcaaaaaaaaaaaaaaaaaaaacgctttcgggttctcctggcgagttttaagtcacactggatcgctgcttattttcagagatcacctcgcacccatgcacctggaaggcacccaaagagaatcattttaagaaattcacttcatctcaccctaacaacaaagcacagcctgcagcacatggatttcacccatgtgacatcaatgctaatcctatgtgtgaaacatctgggttcattcgattttttaaaaattagtaactgagatggggtctcgctatgttgtccaggctggttctccaacgcctgggctcaagccattctcccgcctcggcctccctcggcgctgagattataggcgggagccaccgcgtcagcctccactctttttgcggcgacaaagcccgcccgcctgcggggcgttccgttcgcagaaactctgtgagggacgccgcgggggcttccaagggacgcggcgaaaccaaaacagtcgccggtggttcacaaaaccacctcagaaaatgcttccaaaggcacgtctggcctccacaaggtgacggcttttcagcctccgactcgaacttgagtcgtccacagcactaggccgccgccagcccgggcgagctgcctagggaccgcggacgccgcagcaagcagctccctgctcccgccacacccgccgagccagccgcgcggaacccactcccccaccgtgggcccgcctcccgccgccagcctgcccacgattggtcgactgggctgcccgtcgcgagagaaggcggtgcctccggcaggccggcgctcccattggccgggatggcggcggcggcgcgcgcggccccggcgagcaggggaagccggtggccgcggctgcggaacgggcggaggctgccggtttcgtaaccgtcgctcctcctcgctgactcgcgggctgtgaggcctgggtcggctcgggccgcaccgcgcggggccgctcggagtggaggccgcctgggggcaggcgggctagaggagcaggtaaggaggctgcggcgggcgccctgagaacggggaggaggaggccgcggcgacgccggccgctcgactgggtgcgggcccggctcggggaaacccagccccggccccagacggcccgctggcccgggaaggccacgcgaggctggaggcgcgggcggcggcgccgcgcggcgtctgatgcaacctgccggcaacacccggcggggacgctgagctcattcctggccgcggcccagcgctgcggcgccgcccgtcgacccccgcgctgcccggggcgcccctcgcggcgggccgggagcgcgcgaacggccggggaatgccccctgcggagcccggccccctctcggtgaaacgggcgctgtgacccgccaggctcgcattggcccctggggatgaagggtgttcccagaatagcagaaggtggaccgagtcgagctttagaatcctgatcttctagaagggctcagcttgcggtgatcgaaaatctgttcagaagttcaaagactgatcaataaaatagggaaagcaactggtttttaaatgcatgactttgcagagataatattttgcttctttgtggagctgttggaatgtcctgcactttactgttgaacgtagtttagaagaacacgcaacacctacgggtcgaatagagaagaaatgaagcacttcgcaggcatagttggagggagcggagcagggccgacagccagcggaggtgaccagatgcgaaggatggaaatgcatgtgtcgcggggggaggagagtgttttccagggcagctggtgtgttgcttctcttccgcaggtttacgtgttgggttttcctcttgtttgaagtttatactgtaatctggcatcctgaaatgtataagatttagaaaggtctcaatgttgatgggtgacaccaaaattggtagttgtgtcagaattgactgcttatatgaataggttgtcacttaaggcagacttctcccaaagaaatgtgactcccagagaaaattttaaaagaaaatcctataagggcttgctttacgaagacattctacacctagaagctcttgatatttaagatgtggtcatctgttagcccttgagtagtatttgggataagctgttcataaggtcgattctgcttctggaaaaagttgctgtaaacaaggctaaataattacagggtacaagggagctgaagcatatttcagcttcttgattcctgcttttggtgggcacacttggctggttcagttatttttaatacctgcttttaaaaaaagtagatggaaacaaaacttcattgagaatatcctttaaattctcaagatcacatcatgtctgtctgcaaggctgtctgatcttggagagatggtttcatccctgggaaattaaacactatgtgctgagcccctggtaaagacaaataggacctcgtggggctgaatttggtctcgtggtctaagattgcctcacttggtcacagtaatggtaaatacaggtagccacgattccagctgtattgtgcgttcttgggagggttggttccatgggttgttatattgataggtacactggcctcctgcgtttgtggctttctagctctatcagtaaaaaaaagacaaaaatgagcatgacctcctaatggatgttcatttacaaatagtctatttgttttgtgtgttgtaaatcacttcaaaaggattgggttagaaagatgatgttgatgttcttctaatgctccagtgacccacttctgtactcccagaaaggggacgtccccttcctcatggaccctgcgctagatgcttgtgaagatctgcagggagacacgatgcggctggagttgacagacctagggaacaaattttcccagatgcccaaagaaaagagaaagcacagaccatttaggatacagatagtggtttagtactgtcaagatgtggtgtgagggaggagagagggtcaggaccttggatttgatcctgtagactggagccagagatgaattttcaccaggagaatgactcactcaggtttgagtgttcaattgctctggagacagaggttggaggaagcaggctagaccagagaccagtgtccctgagagatgatagtggcctaaggtgatttcgatgggattgggatggagaggaagagtagatgggaagttttttttttgtttgttttaggtggaattgtcaaatcccagagactaaacagagttaggaccaaggagaaacatctgtgactattttgaaatgttgaccttcattgaggaaatcgagtgaaaaatttattttggtgggcaaggggaggaatattgggttctaggtctgtggagaaaagggacaaaagggttaggaaaattcttgataggtttattttcccaggtgaaacttgagaaaaatttgattttgttttactcattctaacattctgcgctttcagtgtgactgacgtgaatgaacattacttgaattaagtttgaattaaaacaaagcctattacccacttagtccaccattctcaatattcattgggaatcagcagcagaggccctcagacttcagtgtattcagagttacttggaggtctccttatgaaaagattactcagctctgttcttagaactcctgattctaagtctggggcagcctgagaagttacatttctaaagagttcctggatgatgatgatgctggtccagggaccacactttgagaaccactgctcttcagctttcctgctgtttcctccttgagtgattcacatggaaggaagccaggcgccgccctgcatcctgtagcctgaactttggaatagtgtttgtccacagaggagccagacttgaatttaggactgagtgtccagctttcaaataaacactttttgcctgttgtaggtgttcagtaaatgtgtgtggaggaacaaagcgtaaatgagagtggccttttcagtgtaaaatcacttagctctttgatccccttttacttggttaatcttcactttaagagctatttatatggttaaagaacttactaaacaaaacattcttggagttattttgattatctccaagtttctctttcttacattttcaccagtttgtaggttcagtgaatactcttttcaggccaaagggcttacctttaaaacctcacctaccacacacgttcagcctagtaccttgcaagatgagtcaggcagaggtgaaaaagcccttccctgttcctgtatctttggatacggaaacaggcgtgaacgttgctgaacgtggaccctgtagtgagtaagagctgtttgttagtgactgaaggtcgtggtgtgttgtctgtaggaaagtgtcttactattccacatccctcatttgcatgtggggaacagacagccatggaagaaaagagatttgcccaaactaaaatagggggagccacagccaagacaagaactggcctggtcactggtctctaccgctttggatcattgctatctctgagcatggacaagttgactgtagagagctttaaaggctaaaaatataattggtatattaaaaaaaaagtagagaaataaggtgaacatgattatgattgttaagacagtctcaggggaggtgttaaacaagttcttaaaaattgagtaaagcacctctcacttgacaccaaatggataataataatgttaggtggcactaaatgtggctcagattaatactaaacagccacttttctactggaagaaaaatgaggcaacctaatgatgaccaagggaaattgtgaactgtccattactgaagataggcttggagtggatcgccctcatggtttggagggatgctttttgtcttgccttagtgttggcgtgagaacagatgacctactagctcagagtcggctgtgtggctttgaaaacaatggaaagtaatgacacatggacttttcaaagcaaagatgttttttaaaaagagaccaataaacagtgtacagaattgcctggctgaaggtttgggtgtagctactggtgtttgctaactgagctttccctcattgtgggatcactgcataaatctgactccagattttttccactgatgtgattttagcagttttgtgaaaagagaacaggatagttttatgttcctaacactgctttctaaatttctaagagtgccctgattccttggtggacaccgttcactgaacttagtttgtcttgaagtggcctcatgttgataggatagtcacacttttacacttcttggggcagctgtagggacttaattggattcagagtaatccacatgtgactgcttttcgaaaccgtgccttcatttctgcaggcagcagcacagggatgcttcagagctggtgcgtcctccgagctcacacgagctcatttggtagcacgaagtggccacaggcacggcagctgctcagctcctttgtccagcctgggtcccaggacccgcacttccttggatgcatcatgagggcttctgtttctttccttgtggtttcaggttgagtgtgttttgagttttactaattatgtcaagaagaaaaaacacactttttacaagcttggtgggatggggagcaaattgagtgtcagagctcctaaattcaagaaactgactcagtaaatttggttaaactgtggaattatcatttgaggtcattaaaaaaataaagcaaaaaactaccttttcaaaatatccgatgaagagagctctgggagagaactcaagtcctcgatgactccctctctgcatattagaacatggaacccgcaggggtgatagcatgagagcgctggagacagggtgcgcaaccccagccttctgttttgacttgaaccaacaatggaaacttttcccccctttcattgcaggtgtctctcctactacagtcagctgcagctcctccctgggagattgtcaagtgctgttagttcacatgcgccacctaattagtggaagtcttttgttttcctcccatttttgataacaatcgcagaggggcagtgccctcagggatccaggtgggctgagtttcgcctgatggtgcttctgtgcttacttacctttctaagtgaaatgatttagacttcagaaacattggaacagttggcagttgctgtagacttttctcagcagaatcaattaatgttggcctgatgttaggtacgtacaagtttgatctcatttgatcctgtcatttcaaatattttaatgcaatttattttttaactaggtacatgtgaagattttttggcagcttagcgtggaaaccattgatcaccctgctctcatttctacctgttctgtgttggcaagggagagtgcccaaatgagcaagatatcgcagcaaaacagcactccaggggtgaacggaattagtgttatccatacccaggcacatgccagcggcttacagcaggttcctcagctggtgcctgctggccctgggggaggaggcaaagctgtggctcccagcaagcagagcaaaaagagttcgcccatggatcgaaacagtgacgagtatcggcaacgccgagagaggaacaacatggctgtgaaaaagagccggttgaaaagcaagcagaaagcacaagacacactgcagagagtcaatcagctcaaagaagagaatgaacggttggaagcaaaaatcaaattgctgaccaaggaattaagtgtactcaaagatttgtttcttgagcatgcacacaaccttgcagacaacgtacagtccattagcactgaaaatacgacagcagatggcgacaatgcaggacagtagacctcaccctttccagactttagagcttgtggcttgaatgttaaaggtgtgaccaccgacaccactcatgtcaatggctgaaagttgtccatttccatgactcaaagacccattggaggctattttctgggatcagcactgaagagttgattagctaaaaatgttagccttgtaattcgaatatctggttttaaatgatagaggtttttgtgggaatcaaaatcccccaaatgttaaggtatatggtaaaaaaagaaatatctgggatcccgatgttcttaataaatcctgacttcccaagaaatgcttcttttttaagttgacaaaaggaatggggaactggcaggccgcgcagaaggttcttggttttaatggataggctgaattggattaagaaaagttgaatgccacctatggtaatctatttgtgattttcttctaaattatgtattataaattcgtagagctatagaaagcaatgagtgtgtaatttggagtgattttatatatggcataaactttgttttaacataattagtactgttttcccccaaaagtacaagtttttgagtagcaatgtcaggttaagtaaagaaacttcatcacatcttataggtagtgtgtggccaattgacttaaaaaatacaaataacatttaggaagcaaatagattaaacacaaaaataaaactaaagcataggaattatgtttttgagatacctttgggcttagattggcattgttttattctaaaaacccaactcagtggtgtagagaaacttgtgtaccaaaattttagtttctgcagatgctagtgtttttttggatacaattttgacaaccaagttagtaaacaaaatatcttaacagtttgatgacacaagctactgatgagggtttggaatattaattcagaaggtagtttctcttgtgttcaaaatagctgccatggggctgttacttttaaagtcaaaattttcttctgaaggctcattttggtatttgatcttaaccaagtgattattagagaaatgtatcaactccatgccatctcccaaaataattgtctaagaaaacttgaaagtgtaaggttttaacctttaatttatttctcttaaatacatcttttgatattgttgttgtgacatttctttttctggttagtgggctttccagactttgtaccactgcttctgtttattcatttatatgcttttgtgtcccataaattatttcagaaaatgctgataaaactcaggatattgacatttttgttgagactaaaaaatggcagtcgctaaagtagggactctagagtctggcttacgtcagtgttggtagtttagattgtctttgtcaacgttttttcttctctcttttgctttcttttctttctctttttttcttagcacagttctagctcaaatttgtgtattttttgtgtgcctgggctggagatgagagactgagtcataactgatttaaaagtttgtgttatcaggtatcttatttgaacatggtcatttttggccacattgctgtttcatactaggacttgggatgatgtagccagaataaaactcaagttgcaccctccggttggtggaagattgctgaccgtgccgtttctgggcaggagaagacatcatggtgtccagcaactcagcaaagccattcttaagagtcgtgaggtccttctgaatgtaaaactggagcccaggagaagctgtcccaggagggctgttaactccctatagagccaggagacaggataggggtttctagggtccaacaccagcttaccttggagtatgaatctacccatgaaggatgagagatgttttgaaaaactagccaggacacacccacaggatcctactggctccttagcagctgattggtgttacataattaacttaattggagatgcattaggtcacttgaatgtataagcaagcacctatggtaggcgctacagacatttaaatctcttgggaattcgatgctcccatggaatttataccagttatatgaattgacttaagtatcttgaaaaagaaactttagagaaagcatcaggggtgtgtactcagtatttcaaatcagaacacaagattggaacttttggaaaaatgggttcaagctttcctattagccatggaaatgcaaagtttagcagaagcaagcaattaggcagagaacaaaaatgttaagcatggtgttgtctatcttattgaagtggttggaaatgaaagcttttaatttgatagatttatcagtataaaattagggaaaccacgtgtggggaatgaatcaatttagagcttcgggaattgtgaggtgacttttgtaacttttgttctgtgtgtgacctgtgaaccactaggatgtgatctgcccttgtgggcaggtccagcatagttaggagttaggctttagcataaatttctagctgcatctgagtctcctgggatgggtgctctttggctggttttggctgcggatggtgagatcagagcagctcttcctgctgctggcccctgcaatcagttgttgggatgccagtgcagatcactaagtagtaagattttaatcaaacacgaccaggtccgaaatgcaggtcatgagtgtgaaattctcaaatttacataaaaagtagaagtatagacagtttaacatttggtattaaaggagaggaaattgtagcagcttttcacgtttcccagtccccattagagggcttgagaccttgtacctgaacaacccattttgcactcagtgctttctgatgccttaggagaattgttttgtttcacaaaagctgggaaggaagaagtccattctgcagctgttagatctgcctctcaggaaaaagtactaacttgttctttttgttcctggctttcatcagtttgtgagatttctctattttttttaaatataattttatttctttcaacaaatataaaataaaaaacaactttggaacaatgacttgtctttcatcgtggctttctttatattagataccaaaaagcagtccagatgttaaacagctgggaagcccaggcaggtgccttgctgtctttcctgttcccacactggacggctgggggtaggggtggggaaagtggggagacaggcagaggtatttgtgtccaagtctagatctccccgtttgcccttagtggataggaaaatagttttctctgaacatgggatacatctttagttatatttttagtcacttggtctaaactaaaaattataccagaatagggaaaggaataactgaataaatgggttcccgcttaatcacctagtgtctcagaacatggtttccatttagagagggaagaaattcttatgtttcgagatagatagtcaagaatttaaagtaaggcctttccccatctggagttttgtagtacatgtggacactgtcctcatttacgtcatagagtgtctgtagagatgaatttgctgatttcataaactgttgagtccagggagctgatgtgaattgaatatttcaagggaatgccatttaaatgcttttcttctctgatgcctcaattattttcatgtcttgggaaataaatctctgcttgctgcatcttaatgaaaagtggaggtcaggaattatttctatgggaagtgtggcccgtttcacttttttgaattagttgtgatttagaatccaataacgtgtcttggggaattttaccgagtgatgacatctttgtgaggggggccggtctttttctgacaaaagcacttttagaccagctcatccactgcctgtgcctagccagagagttcataagcgttttacagttttacatacattcagagaacaccattgcctaggtattcttttactgcagtatcccactcctcacagagctctaggcctgaaagctgtatagaggcatctagagaaatgggggttatagaattggacttggaaaaggaataggattgtcagtgaaacagtcacgcgttacactttttgcagcccaaacgccacctcttgtccctccctgtaaagaagctgttaaaaccagatgcgcttccacatcgccacctttcacttccaccttctaaatggagctccggtacctgtctgcttcacccaccccgacccccatgcagagccatcctcttcgcttgcctggacttggtgactggctcctcgttggtgttcctggatggcagcgtcactgcctgctctccagaaccatctgttgctccccattgcacccggggtgagactcagtctccttgtgtcgtggcgtttcccctcatcaacttaatttccctccatcctcctgtgtcactctacttcggctctagggcttttccaagctcttttctgcccttcctgggacagctccttctgtctggaatgaagcatctcctctggcttttcactaacaagttccctctctgtctcagccccctggctgtctacgctaagcctatcctgttgcttgcttcatggcactttgcagtgtttgagacaatatatttgttcatgctggtttgaggtgaaggcctcgcagcagactagaggctctggaaggaggggtcatgtttgtatcctgcactggcagagtagatgctcaattatgtattgaatgaatacctagacactgagtttcagaagggttgtagcacactatacagctttctggcggggtctctaatggatttctgaagctacatgaatttctgcagaggttagaagagacagagttaggtacaaacatgggggtagcggaggtagctactggggccctctagacctgtgcttccaaagaatgccctttgagacaggtggagactcacgcctgtaatcctagcactttgggaggccaaggcaggaggattgcttgaggccgggagttccaagaccaacttggccaacatagcaaactcctgtctctatttattaaaaaaaaaattttttttttaaagagcaccctttgacctactggctcaggaaaaacgtgacctctctgttcctagtgaccctctgaaaagtgtttagatagaaataagagatttctccttgctcctttttgttcacttcttgataatcagagatgtttatgtggaacgggcagctttggtatggaatgtctgaaaggaaggagaaagatgtatggtgcactcagctctgtttctcaattaacagaactaaactgtccattttgagcttcatcctgactttgagtggttttatcctgaaagtggtggaaattaaagccctgtacaccagactgtgtctgtcacaggggaacaggggtggagaagtgcttggtgaactcttcaactttccttacactcagaagatactttttttttttttttttttttttttttaagagacagggtcttgctctgttgcccaggctggagcgcagtggtgcgatcatagttcactgcagccttgaactgggctcaagcgattctcccaccttagcctccagggtaggtgggactataggcgtgtgccaccacgcccagctagttttttatttttactttttttaagagacgggatctccctatgttggcccaggctggtcttgaactcccagcctcagacgatccttcagccttggcctcccaaggcatgagccactgcgcctggctaaaaagacataattgctactgctcaatgtcacagatggatagcttagggaatgtatctgtaccagcagaaaaccttaaagaatggatgttataaatctaagaagcagataagataaatggtgatttggaactgaaattggcttttattttaatgtgaccactttataagcacttctgtgttattaccataggaagaaatcagtttgtattaaactctttggtgacttttttttttttaaaaaggcagtcttgctttgttgcccagggtggagtgcagtagcatgatcttggctcaccgcaacctctgcctcctgggttcaagagattctcctgcctcagcctccggagtagctcggattacaggtgtgtgccactacgcccagctaattttggcatttttaatagagatgaagttttgccatgttggccaggcaggtctcaaactcctgacctcaagtgatcaaagtgctggaattacaggcgtgagccactgtgctggcctttggtgacttctgaaaacgtctcttaagctacagttttccaccccctcatcctcatggtttcatctgtggcatccttctcacttgtcatctttcaccttggcttgggaactcttggatgggagctctgtgagaaggcaaacctggaatggtgtacagaattctagaaaccagctccaggggtgggctgttctgcgggaccctgggagaactggacaagcagaggcaaggacagatacttcaccaggcatggctgggccctggctggcttcctgcctggtagaatttgttcaaggactacacttagggaggacaagcggtctctgcaaattggctgtggcgctgccttcgttggcagtgtctccgacagatgctggctttggctagtgtgtcccacatgaaaaagaaatcaaggacaagagatccctgcaagtctcaggttttaaatatctgcagctcaagcgctacatgattctaccaccttcagaaatctagtttggaggcagtgaccgtatcagaaagacttgtgttaaatcagtccgccctttaacttgcgcaaaggcatggcgcggggtgacttggccagtctgacctgagtgcctaggatcttcctgcagcgttgcttgccccacctcaaacctcgggctgcgctggtactgacaagctaaaaccaccttgcctaggagtacttctcacacttgtctgtcaggagcatctggcgggcgcttgtgaaatacacaattcctgggccattgcccctagacgttgggtcagatggtctgtgggggtcccaggaatctcttaccaaatgccccagtggttctgatgcctgttaggcttgggaaaccttgcagcaagtgacagggtgacaccagagccccgagtcccaggggctcaaagcaggctcctcggggaggactctgcccttgtcccgccaggccagtctgaggcagaagcagccgttagagggcctgtgctgccagcaccatcttcctggaactgacttgatactgacaccaggtgagccatcttttcagggtgcacggggtcccaaatgctcatctgcaaaggaataaaggggaagccacgcacaaaggaccattttaggaaaccttttattgcaaatgccattctgcatattgatttttgacagaaagtatcagaaatgcttctttcctgggaaaaggaatataaatgacagcaagacacattttagttgctactaaagaacagcattattttcaatcattttaagtcgctcatttaataagcaaggtataaaacagattaaaggtgggagcctgcaaaagggtaattaaaaaagtgtttcctccccgggaaacagcactgtttggtctgatcaaatgccgaagctgggatctgattctgggtgccgtctctcgctactggagtgctgaccagcaggctgcccatcacgaaaagaggttgcaaggccaggcccccaggtgcgctgggatttctggctggctctacttggggccagagaagggggtaaaggccttgtcacagcctgccatgcatgcttcaatctcttccacagtgcggggcacgcaggtcagcagctctatgccgctgtcagtcaccacgacgtcctcctcgatgcggacctgggtcaagccgacagacacacattatcatagagcagcctcatgtgccaggctagagggccgggcccattccaggcccaccccaccatgggatgggagcagctgacactccctgggagacgggtggcctccgggctccttcatggagccatctgcccatgtcacctgctcaccctgtctttgccaggtggatgggagcccctggagcgggcaggggttttgcaggatctctgtctgttcctactgaggggtgaggctccatcctgtgacagaccacacgaaggggcaggctaagcccacctcaagggaagatgtcactagggcccctgtcttgggactaaggagtctgcagctgcagtggaggtggcagatgttctgggagcaagaatggggcccgtgggcactcaccccgccaaaaccgcgaaagcgctgcaggacctcgcggttaaggaaggaggcgcgggccgggtccgccagggcctcatccaggaggtggtcgatgaagtagatgcccggctccacggtgagcaccatgcctggctgcaggtgccgtgcagtgcgcaggctccgcaggccgggctcgtcgatgcgctccacgccctgtggggaacagaggtgaggggcctgatgagcagctccagggctcaccgtggcctcatcaggagagatgggcatgtgagggccggtgccagtctcgtgggctctcttgaccattggggtcctcagcctagactcgcccctgctgtgctgggccatgggcaccctgataagaccttccaccctgcacatacccctggatcttgagtgtccctggccacactaccctagggcttgcttgagaagccctgtggccacccatgtgcacacacccggggcaagctgcccagacaggcctgtggggctggctgagggttgggctgcccttagccaggccccgctgctggccagaggagtggcagatgccaaaccactgaagccaaaaaagctcttaaggcggctgtgaagccccttggggccacagctttccttccaggcagcccaagtagaaactggccccagaagtcgtggtcccagctcccctaggccgaggcccagattttccgtgtgactgtccagggaggacaggtgccgtcatcagggtgggtctgccagccttagtgcgccagtgcaaatgtgccgtgtgcgcgtggcttggcaggtgtggctcccagaggagagctcggggccttacggcagggccctgggaaatagcccccagccttggagaacgcctgagggacagtggtagagccgctccctgcaggggcccctgtctgcgccccacactgccccagtgcacacccagcctggccttgtccactcacaggcacagctgagggggcctcagcttggctgagggcagcgggtgctctgggaattacaggagagctcctgctcgcctcaggtccccggggcaccatccggccggcggccagggcctctgagccagtgggcacgagtatgctttctggtcaggggatgagcctgccctgcccggctgcactccctccccaggaagcccagctgctggagcgggagctgtcatttctgactgtttgggggccaagaacatcagactccaattagcagttcacgtaaggtaaccagaaacaggctggctcggcctccacgctgggcacggccagagaggctgtgactgattccacggagggcagggacagccacgctgacctggagagagcaggccaggcgggaggcgatgaggagacaccacagcctggctggtgtggccccggccccacaacacttgcctctgggccgctgaccgggagctgaggccggagggcagggatgccccgtggctgaggaaccgtatggagtgacagtccctctgcgcaggtgagaggtgcatgtggaccgagctggggcctgtctcctgcccagaagctgctgggggtcccagggtctctgctccaggaccttcccgtccctgtcatccgaagcctgtgctgggctcccccaccccaccgccgcccatccctctccttcatgctattcctgaagtgtccgtccctgtctccacccacagcaatcgaagccaggggcctgggggaagcaagggcctgccaacgtcaggtttccttccttccagtcacccctccatccccatgggcccaccccggctgctccatggtacacggttgaggggcaggtttgtttccccagagaaacgaactttcctcccctctgaaatcttgaggtccaccactgaagtggggtgggggagattagaagggatccccagcgggcacagggcaaggcctgcctcagcccagtggcgcagctgccccttcagggtgttggctctaggggcctgcccgggggacctgctgagaacagggcgcaggcgccataagagaatgggaagggctgggccgggtggagcgcagagccatgtggggagggcacgagcccctgtggcccaggaagcgcagccttcaggggtggggaggggtcctgccctcaccgcgcccatgctcgcctctgcctgggcacagggcttgacaaggcctcaacttttattgggctccaagcagaggagccccagatgtgtctgcaggcctgaaataaaacaaatgacttttataggaaaagccatattttttccacaatgtttatctgtcagaagaatagactctgagcacaaagaggtgcttactggaaaagatgaaaacagtttgctgccaatttttgctggtggaaaaaaagcgctttggcgactaatgaataacgaacctcagctaacaatgtctggaaggcccagctcttggctccctgcacacaatgggatgaatagacattaggaaattaaaactgattttgtttctccaaatttaactgtttacacttgaggaaaaaaataattgaataataatgcttctcttaagcaattccccccactgcccccaccctgccaaaaaatcattcttagtgctttcaaaacaccctgcagccaagaggctgagccttgtcttggctaactggctggggggccccagggcgtgcacgattgcacaatcagccccctgcattgggcagcccgccaagggcagggatgggagcgccccagccgcccagccgagaggccgtagccacctgcccggttgggcctccccaagcctcacttaccctctgggtggtcctctgagggccggggaaccttgtctggagatggcccccagcctcccttatctgccaacgggccccagaatgcctggggatgaggaggctgcagggtcccaggtgtgcggcccaggggcctgggaggagagggcgaaccagcggcagagcagggctgctccgggtttgtgaggggccagggtgagtcgccagtgggtggggcctcatcaactccccacgccccaggtctgaatgaagccagaggcggcaggacgtgaggggtgccacgtagctccatcacgaagacctgtccttagcaccactgtcctgtggggccccatgcaccgtatcctgactgtgtgccaccttctggacaggtgacacctgggcccagcaggcagacagcaccgcctctatgtccagttctgtggaatgctcacagatgcacccctgtcttggccagggtcccgattcccccctcctcatggcctccgtataccacagggagccatggggcccatccctgccatcccaatacacgcctgctgcctcctagagtcccaccctgccctgggggtcaggctcagcggcagctgatgggcaggccactccgcctgccatgtccacactgacctctgggtagcctcccacgtcgtgcacgtcaatgcccaggaagtggccaagcccgtgaggcataaacacggcccccaggtgagcctggaccatggcgtccacgctgccgctcaggatgcccatgtgggccagctcctccaggtggatgcggtcagccaggcggtgcatgtcaggccaccagacacctgtgggccagagggagctgccgtgagccacagagcccagcagccaacaccgcagggccaggggctgggagatgtgaagccctcacactggctgtggtgggagggcctgaggtggggggtgagggggcaagggtactacatcgggggcccagggggacaaggactagggtggccccccgtgctgggctttcccagcaaaagctctggccctcgggacccttcttgtccctccattctgcctctaggggcaggttcctgtcacctgtagccaagggcccagcctgggtctactctgtagcccatggtgtgtccaccctgaacagcctatgcttctgggcccagggaaacctagccaaatccctgggcaccaggagaaacatgcacgtctccccagtagcagacaccaggagactctgtgggctctggccctgaggctcagacccaaaccctggctcagagctccgatggggttttgctgctgtggtgcagtggggaagcccgaggctgaaaagaggggtccctgcacatcccagaatggggatgaaacacccctggagctgctgcagggagcaaaggtttctggggagaaggtgcggctggcacggccccacgagctggctggcaggggttcggggccccgcctgccaacagcaggggcaccatctccaggggagccagatgtccaactcccggcttcaaatccaactcatctctgccgcatgtttgtggggcaaaggccaccaaagagagaacttcctaagcacagagctttgggggccacacaggctctgtggggctctggagcatggccgctaggaaggaggcccttagagagctctccacgtagagcctcagcagcccacgggtgcgcccgtcccatccccggactctgtggaatcccagcatcagcctctcctcatggtagcttccactgctggacttggcttgagcaccagataaggactcgaggccggtgaggcctcctgccctggccccatgggggctgggtttgggcaggccacgtgctggcagaggccggggccccaggacactctggccaggcacgtggcggggggcccctatcaatgtgcagctcactggctggagagggcgcccagcaagtccctgcggcacctcctggagaggtccagccccaccaggcggagtgaccttggctcccgagggcctccctgccaggcttgccttggcgcagagccagagcctgctctgcatggtcccgatcactgctgtgggaggggccggggagaccctgagctggcgagggctgggctgtgagaagcagggttctgaacctctgtggctggcggagggcagatgatgggctcggctggcgaacagggatgagagtccacactgggacacaggccatcacccccgacacactgggcacaagtccttcatgttgggacccctttaagtgccagagttggccactgtggtgctggggtctcaggcgggctgggggtgcacggctttgggcaggcagtatggctgttgcccgccattcacagcacagcgccccagccacggcagcagcctaagggtggcaggggtggagatgcccagacctgcccccaccccccacacagagcagggatcctcctcagagcccagctccccatcagcccagcctcctaggggctgaggtgggggcggccgtcccggggtctggggtctggcgtgggggaggccgtcccggggtctggggtctggcgtcggggaggccgtcccggggtctggggtctggggtctggcgtgggggagggcccggggtctggggtctggcgtgggggagagcccggggtctggcgtgggggagagcccgggcagacctggggcaactctggctgcagctgccctgtatctggggcagccctgggcacacacacccctggctggcccagcccgcacccctggcttttctgaggggcacaacatcccggaaaaggacacctggataactgcagcccacttggccgctcccccgcctccgtgagcctcagctgccgctggtcaaacagccccacctccgtgagcctcagctgccgctggtcaaacaaacaaacagccacaaggcaggccccggggggttgctctcagagcctctgtgtcacctgggggctggaggcagcaccccggacagtggcattggccaccattcctccatcgcgcatgaccagccagccctggttccacacttgacattcacttgttcctgggggtgtgcgccaagcctgcccagcctctgctgctgctcttctctgagaacccagcccggacaatcctggcccacctcgcccttcctctctgctgctgcatcctccagaggccagaccaccccaaggcacacaggccgttttacctcaggccctttgctatggcctgtgccaggccttgacctgtgatgcctcatccaaggggtctctgcataaaagctgtcccctctcagaggagaccttcctgccttgctgtcccaggcctggtgatttctccttgcacggtccatccagcctgcagccgtcccctggacggatctgctcgtttgcttctcatgtctcactccgagggtgggggtctcccgagggcaccgctgggcctggcataaagtgagtgcccctcaggtctcccaacagcctgcaaagttggcacatggggctgggaggcctcctgtgagtggctcgtgccccaagcccagctcaactgcttcctctcggacgcgcccttctctggtcaccaaaggggagccccgggaagtgcagccagctttccaaccaggctaacttcagcagtgggctacgttcttggcccagcctccgcagagggcgggaatcaggtataaatcatgctctgcggtggcccttcccgggggcaggcccggcgccgcccagatgtgccggcccgggggtccccttggcgccgctggtcttccttgcctgtgcaccctcggggaaggccttgcacacagctctcttggccgggagcagggagtttctgcctgtgtgtggttagggttgtgacagtgattcaacctccagcaacttggccccagcctctggcccggatggtggttacgacacccaccgcctgggcgggggcccctggagtgtgtgagggtcactgtccttgcactaggctggcagggtgggcaccaacttgagggttcccttgctggcctgggcccactctcaggctcctcccaccctggcagcctggagacaccgtcaagctctctagtccaggctggaaggcacccccggcccctagccagcctatacccagatgccacactgagaatcacacagcagaaattgggcaccagctgccctgcgtgccccaacccccagcaagcaccaaacctcattctggctttcccgaagcacccctgcacctgccccacccctcctggagtctgcctggctccctcctccgctgcacaccccttggatgcctgggccatctctttagaacgaacggggcaaacagggccattcccggccccggacgaagcccaggttctcagcttggcctggtctccagcctctccctcacccactcctgggtggggtggctggaccaaggccacgggtcccaagaactggccctccctacctgctgtttccttagctggggccacctcctccaagcccgttttcccagatgtgctcccattcctcctgtgggcctctgtggtgaggctcctcctccaggaagccctctctgattaccccttcctgtactttgagaattcacggaacacacagcacagctgggcctggttatgacctctgggccttgcaagggtggtgcccgtactctgctctgtgcctggcatgctgcggatgcttggtaaacgcctggaaggagaggagccccagcttctctcatggctctcctgcagccagtgttgtgccccatcccccactcctctgtgtactcagaccctagaacgggcagggtggcctctaggttagtgtcccatcatgcgcctcatgaaatggcagggctcagaggaacaagccccgctgctcctgccacccaggccccaggtgtggccagcgtagcccctgagtggtcttctgggtccacttggtctcctcaggcagcacccgctcctgctgggcctagggcccaggccagctccttggagcctcaaagcatccatcacagccccgaggcctcctacccggagtgtgacagccccagggggctcccgggcctgaccgagctacaaaggcagcatcctcagagctgcctccagacaaagagcgcacttcatctgtggaacatggccctcgggatggatgggtgtgagccaggctctaggggtgtaggacagcaggctccggccggggtcccagggcaggccctgagggctggctgagctggcacggggctgaggacctccagctcaccccaccctgcacgggacgtgagtagaagaaccccatctgctgccagaaattctggggacccactcaccctgcgtgagagcagggtgctgtgttggcccaggctgctcctcgagtctcctcccccacaccctggcagagtgccccgaggagtaagaagaggccaaggaactggctcaccattgcggccggcaggaggggtggacatggtgcccacactgaagacagtcctccccgtcctggcacctgccgcagagggtatctatgactggggtggcacatggccgccatgcctatctgcctgagccctgcactccacgccgtctcggaggatgaggactgacaggaagtctagctgctgggcccctgcccctggcgctggctgggaggggagcaaagctggcagaggtgccccctgaccacggggccacaggagacacatgccaggtgggccggggcaggtgctgctgggcccctctcccagccacctggtcatcccgcgcctcagtgcccctctctcgccccgtcaggactgttttggaggtggggacacttcctgccacttctttcccctcctctgacctcacattggcagcacccccgtcactcacaagtggccaggaccctgagggcagggacagagccaggagcgggggaacgaaacacaaaagagctcatgaatcgtgggccaccattgctgttccaggttgataggagctgggcccccagtgacaggggcacaggaggctcctgggtgagcacaggaaagagtagagaaaggcggggaggccagggagggtgggggggtgaggagagagggagctgggtcggggctgggaggcgaggctacaggaggctctggggcttgcaggcggagggcatggggccctcagtgctggggtcctctggagctccagggtggctgcagggactgagcccgcgggacagggacagctgtgctgcttctaggaacagccttcctgctgtggctgtgccaatgcagaccctgactcagggccaccctgccgggctcgcccatccgtcccagcagcgcctccccccattcccctcaccatgcatgcaggggtctgcatggggtgggcagcctgccccaacacaggagccgcgctgagcttggatcccacccaacctcccgtgcatggcactccccgaggtcctgcagctgctgggcctgccctgccacccgcctgtggactcccagccgccagggtagggtctccgtctgagcgagcgcagcctccttcctcgccgactgtgaatgacagtgaggaatgctcccccaccagccctaggatcaggggccaaggcctgcattcctcaaccccccagggtcctgaccattctttcctgcctctcctttgggcttagctatggggtttcctgctttatttactctccctggaaggtcacaggatgcagtcgggcagtctcggtggggtgtttgtcttggcccaggaattgaacccacgaacccagggcatttccgctgggacaaggcagggggctgacctggccacggcctcctcgatgctacgggaggcgacctgccccatccggagggcagctctgtgggcccagggcctgccccacgggccttcactgtgtgtgatccagatggagtccgactctgcccttgggggacaccaatgccacacagctcagtgtgggtggtaggtgtgggggggctgctggggggctgctccattcccttacacagggatcctccagaccccaggctgggtctgggcagcaaagcccagtggtgggtgggagcggggctgggggaggacctgcctcccatggtctgagatgagcctagctggatttggccttgtggccccagacacccctgccaggcctgaggcctgtgcctgccccaagagtcagcatgaaccaggcagcaccacgggatgggagacccagctcaggcctttctcagtgccacatggggcctggggacttgccccgaggtctggccactttctggacagaattggggctgctgagttgggccagggagctggccaggatgccagctgtggagatgccacccaggtcctgcccaggccgcagcaggctttcctgcaggtgaggccagccagggctgggccatccctggtttcagcacaggagactgaggggtaagacaatggctttcccaccgaacaccccccaggccttggcccctatgctgcgtcaatccgccgccctgctccccgtggcctggtgctacctctggcaccctgatgggcccggcactgcctgctgaccaagctgagctcctcagcctgatgcttgggtgtacagggttgctgggcttggtgggcccccgcccctcacaggctgcaaagctctgcttcgccgctgggaggctcagccccttgcagcctggggctctgactttctggacatctggatttcacgactgcccgtggatgtctgacactaccacttgatgtgatggtgacacagttcgcaatgacacagcccaccttggcacagctacagagtgggaggccagccctgtacgtgaagggtgtctgagagactctggcccacctgagaggctgtgcccggcggagggctctccgtggagggtacaggagctgggctcacagatactaggtgaatacaccacaggccacgctcacctgccaaatcctcctgctggatctgaaacactgatcattcattcgagtgactagtggtatttaaaactgagcaagaaattctcatccccagaatgaaggaaggagaaggagtggcgcccctgggcgactgcttcgtggaggctggattggatttgacagctaacgggggatgcttcccatggctgaagagtcagaaagaataagaagggacgcagcaagcaaactgtcccgtcccttcctgcacctcctttatggttttcacaggcgcacgggaattcacgctctcactccctcttccttttacccacaagggcccgctggccataccctctggcgctcttctgtcctcacccacccatctgcctggagacacctgtatattcatactcaggggtggcagctcctttttgtttgttttttgagacagggtctcactccatcacccaggctggagtgcagtggtgtgatcttggctcactgcaacctccgcctcctaggttcaagcgattcgattctcgtgccttggcctcccgagtagctgggattacaggcatgaaccatcacgcccagctaatttgtgtaattttagtagagacagggtttctccatgttgcccatgctggtcttcaactcctgacctcaagtgatccgcccgcctcccaagtgctgggattataagtgtgagccacagagcccggcctgctgctttttaagcaaagcaattccgcagaaaatgctgttttcctcggcagctgctaaaccaggtgagtccgatcagcgctgtcaccccatcacaagcttattgacttttggattttctgtcctgtcttccttttggggcacatctggggtccccctgcttgcactcatgcgtttgtcaagctctgttcctgttggatgcgtgaaggtgtggggctggggcctggcactgcccccagcgtccctccgcggctcctcagcctctggtgggggctctggaggctggactgggcaccatctgcaaaggcctgcccacagtctgcctcctctgaaagcgacggtggctgagggcccctctgaagcacacttgggccggcgatcgaggctgcaactcatcccagcaacgggctgtggggccgcagggactgctcagtcgaccgccgagccatcaagttctgaggccgcattctggaggctccagatctttctttcttcttttttccttgaacactgagggcgcacttggcagctgccagctctctgtgggtccttaacagagggcactccatgtctaactagatgccacggtccagagctggccaggcccgctctgaagtggactctgccttgggagagcaggggtctatccttcgcctgtttggggcttaagtaaggtacctggccagcaggcggcagagctggggctgggctcggggcactctgggtctggggcctgcatcctggactctgaagccttgcgctactgggctatcccctctgcccgcggtaagcccacctggctcctggaggacgcctgagctcccctacacagggggctgccttgggcctgcctgtctctctggaggtctgtatagctgtgggtgagaggcagtgggcgagggtgggggcaagctgggggggctggactatgacctgggcatggccaacacgaggtgatctctgacctcgacccagatggagggactccaggctgcagaaggtggctggggcctgtgtgctgagggcgggccctggccagacgatccagctgtgagtacagggccattgtcctgtgccactgcagccctggccccagcccagacctgattttccacctctgtgaatttgtggcagccccaaatgaccgaattggctggagactgttctgttgcttataaccaaagatgcagaacctgcgtgccttggggggccagctgtgcctgggccggtgtgggcagggaaagcccctctgcgctgcaggctggaccctggcagctgccgaacagatctcagtcagagtcgtgggagccatgtgcctgtagagggccaggcctaggggttggccagcacatggtgatcccataggaacctgcccaggctctggtgaatccaaggattacggcaggggtgctgtgttgaagccctggaaggcttgaagcaagaacatgagaagaccacatccctcaattctctcctctgggcaaaggtgacaagccaggacctcccatcactgctgggaaatggtttctattgttgcagggcagagagctggggttcgatcctgtgggtgctagactccacccctgccagggctatggaggacccaggggtcactcggcaggaggctggctgagcgggatggggacagcgggaggtgcccagggggaactcctgaaagctggccttgttgggaggatgctggctcccctccaggggacctcctctgcctgccctgacagacatcaacggcgcgcggtgggaggtcaagaggtaccagtggggcctgtgcaggctgcctggggttgggagggctgagggcaggacaggttggcctacgctggccgctgggagagagaaacaccaggcccatcctggcctcaacatggccatcatggtggtgactgtgacccctgcagggcactaccacaggccaggcggccttgcaggtgctttacacagcttaactcagtctccatgagtcggctgcttccccatttacagatgtggaaacggccacccagaggagggctttccatccaaggtcacagagcgctgagcggcacgtgaacctgctctgaccccatgccagtgtccagagtgggttgagccctccctggagtagacaccgcttaaggacaaagcaggagacaggctggcgtgctagtggccagtggagatgcgcaggtggaggccagcagaccggggagccttggcctgagccccgcaattcctggttctgtctgtccctgcctggtggtcagccttgtttcctaggagtgaccctggagacctgacgccactggaatctcagggactaagcatctggagtgtggcagattcaagtcacacaatgcagacccgttccctgcaggcacctgccacatagcagcgcccccaacgccacgtcagatgcgcctccccccaccgacccgctgctcacctggcttcatggcacccatgacggcacgggagctccgcagcactgcctcatagacggccttctggtctgcagtgaacttgccgttggcgggaaaggagcaggtgatgtcggaagcgaagcagtaatactcaccgcccatgtcgaacaggctgcggagagaggaaggcagggcaagtgggtactggggtgccaccgcccccttacccttaccgctccccacctgccctggactcgagggcagctggcccgggtcctggatgcaactccccctcacaatgagaccggtgtggggaactgccacctggtgtctcccacgggtgcgtgggcagcaaggaaacccgaagccatcctggaagacctgtgtcttccagggaaaaagggactcagggctcagcccaggcagggaaggctgaggggagtggggctgtcctatgcagatgacacccacccctgtggcctggcctccaagagctcagagccatggagaattgtttggagaactaaggagaggcagagatgccccaggaccccgcccgctgcctggcctccacccggcaccccaacaggctctcccaggtctccctgcacccagcacagagcacaggctgaggccgtgcttgtgggaagcagaggaggagggggctgggcagggaccccggatgggatgcacggcctagaactccgggcctgaatcacaccacctgcttcttccaggacccagagcatctgggcagacactcagtcggcggctagggcctctggctctgctgcagctctggggccccctagctggaggggtgtgcccgacactacccctctgcccatggggatgggacggacatattctgccagggcccaaggggagggcagggaggaagtgccagacagcctcatgtccagcaaggctttcccagggcctgctggccacatgtccccgaagccaggtgggccccctcaccctgtccacctgcaccctggcaccctccggtggcaggcagagaccagcaggacacaggcaggggcgtggagaatggggcagaggtgccagctgtccaggacgggaggggcctgggggccagcagagaggcaggatggcatgggacagatggcgtgggacagacagtgtgggacagatgacaggaggcctgctgaggcaggaggatggtggctggggctgccctctggatgccctgtaagagggacccttggcacagcagggcccggaaggagtagggcctgtccttgctgtgcaaaggacctcagggccctctctgggcaacggcagagaagcagcctcccgctcatcctgtggtgtggaagggacaggatacgggaagggctgctggatccaaacctggctctcaggactccccggaagcagcccaggtggacaaggctgggcctggctgagggggcggaggggcgcaggtggtgcccctttccatccatcccacctaggcacctcgggaggctgcaggcagcagacacagagcggaaccctcgggtccaccagccccttcacaggtcatggccaagtcacgacactgatggtgatgaccctggctggcggaggctggtctagccctaggaccagagcccaccacgtctgcagggtccagaaccagagccaggagggctgaggaagtgcagctgcccctctttggctccaccctgggcttcccatggggtccatctgtagctgggtgagtcctgacaagtctgaggccaggggcacagccgcggcttccgtcacgagggcctctcacccaaatcccagctctcacggtaaacacaaccactccacaaacattccagaagctgcctgtgcgcctgcctgtggggggtcctgtcccatgggagggagccagggggtggaggaccctggcctcatgtggagcaaggagcagggccacgtggctggacaggcagcgtcagccgccccatggaggcagatttctaaaggaaaaacttgaatgcacggccaggacgctttgctgaaatccaaagtccccagccgggcactttttaatctcctgtcttttctgattgcaaaacaccataagcagtgtcaacagggcagaaaggtccagataacacctcaggtgactctcaggctggggggaggagccccgcctgcatgacagggagctttggggtgggtcagagtcacaggatctctggatgcagtgggctgcttaggccaacaactgcctggaagtctactcctgcacagggcctaggcttccccacggctggccgggaaggcggggcacatggaagctctaaactgaagggaaactgaggctcagatcacgggtccaggaaagccctgagtcaggagggtaaacaactcgaagcccagcaatgggttcttaggtcctggcggcagtgctcaaccttcacggcctcagtttttccatctgtaaaatgggaccctcccactgctgtagctctggggagtggagccatatggaacacagcccagttttgcctggggacagctaagcattttcatttaggttccccagagtcaaccaagaaaaatggtttgtggtttgttggttttagaacatgcaagaatagcctgggcagagaggacagggccaggagtatgggggacacggattcctaggaggcgccaaatcagaaggtgacctgcaacagcagccggggcagaaagtcctaccggactgtgctgacacaaaagaaaaagcagaaactgaactatcgtttaaaaaacaacaacaacaacaacaaccaggaagcccacaagaataccccgaacaatgaaatcatctaggaatgtaaaaacaagactgttctccagtgcagaccagactcagatcccagttccccaaactcccgccagcaaagcagaaagaccatgggatggtgggtgcctggatatcatccgccagcctgactttatcttccagcttgtagaagactgtaactgcatttcttgtttgaaaatgatctgctttctggagggggaagtatacacccagccagccagctccatcctgcccagcgaggctcgggtatggagctgaagtctattttcgtgctcctctcagttccctatctttttctgccttaaaaaaatccccctagagtttctacacacataagttattcagatgcaagcttttctggaatccagggacgaaagccatggctttgataaatcatctccctcccgctcctctgcgtccacttcatccatcctctgaatgcaaaccgacaatggagaattcggtcatacgttggctcaatcgagaacaggcacgcaggatccctccttcctggctgtctggggaccctaccatctttggccgagtgagtcgatgataatacaagacatctgggagacaggatgcatctccaaacaacgtgctggcgtctcactccccacatgtgttctgagggctctgtttctggctccttctgggtagctttgggcctgggctacctgccaccactggcccacccagaccctccctgggccccatggcagggacccgccagcccagaggcagaaggcctccaagatgggtcggccagtgacggaaggcttgggaacagttttctgggggaaatgctgcaatgtttatatgagagccactttggacttggtttgcagtttcatttgaatctcctgagtagtggcacggctcttagctgttcaatccaacagtttacacgcgctcatattcggggctgcagaagcactgcagactccgatgtgcagctgccctggtcagtgtcccaggccaggctgggggattgctgagcagcaggaagcacttgcttctcctcagtgtgagaccgaaagggaggcgtatgggtcactcttcccttcatctgccccagtgggcggcccctgcagacacggtggcgagctgtggtctccagggtgcatgggccggctgcctgctcccagccaggccttccgtggagtgccaagctccaagcgtggccagcagggacaaaggccaccactcggagtccctgaggctccccgtgccatggcctaacccaccaaggggacctctctccagtgcgttcctgggcatctctgcccccttttcgtgtgacggccactcctccagggcctcggcagacaggaaagctgcccatgccgccagcccatgacagcagcagcttctggtccccagagccagcaatccctggtgcacgcggtgggtgacgggagcagctgcgtcctgtgggcctcctgggtgtctggagggaactggcattgccattttatgcatgacatggacagaggcacggcaccagtgaggggccccgggtcccagaagagcactgtggggtgcctcgtccagaggtgggtgagacacaaggacagctgccaggaaagcacagtggggtgaggcccgggcgtcagggcagtggccttggcaggcgggagggagagtcacacgcgcagcacatgctgtattttgctttttttggtgaccagtgtctcatgatgtctgggagcacccaggatgtctggacaagtgctgttcaaactgtgggtcatgacatcagctgaggagggtgcagccacgaagcacaaacaagagacaaaccgaaaacgcgtgggcaggtgtctgctcataaccaggcctgtccatgtgtatgaggacgggtgagaatggagagcacgctcctaactgggatgggatgggacggccatgcctgtgggtctggaccctcctgagggcgttctgtggccccaagagcatgtctttaagaccgcagagtgctcagggcagggctggctggtgacaacaagtctccctcggaggaaacagcaaggtggtgggggagagctgggctgggacaggcagcagagagcaggcctgggggcaacgctctaccctggagctcaccaaagcattgggccccaggtggagtggggcaagggggtccccaggagcttgtcacccatggggtccgcagcgcgatggtggcagacagactcaggctgagtagacagcaggagtaggctggccgcatcccaggctgcagggcccatgtgaggccaaggtggctgctgaggtcctgggtgagcgggcaccccatggcctgcagggtcgaggtctcgccattatctagccagggaaggaggggaagagggcactggtggctgctgagtgtgagggctgggacaggtctctcctcctagccaggctggccacccaccccccatgcccaggagcaacacaaaagaccaggcccagcaggggtgaggcctggcccatcgtcctgagacaacactgccctcttctggccagttctggaaggacaggcttgctgcccaccagctgcatcccgactgggacaaccaaggcctggggcatcctgggacacgtgctctagaaactctgcgaggggccacagtagattaaggcccccctccaacccccaccacctgatcgggaagtgagggaggcaggaggagtgtcccagctgctttcccaaccagagccctccacctctgccctgtggggtgagcctctccaggacctggggcggcctcaggcccggagtgctgcaagggatggtccctctctgggcgcactgcttcccagaatcgtggaccatgcgccccctgccctagctgcgaagcttgctggcctgcagtggctctggtgcccacagcccaggctgtttgtggaaggagggggcagcacatgggggctcagaagacgaccaggagaagcagggggatgagtcctggccacctctgtgctcacacaaacctgttcggggctggagtgagtggggaggggtcttctggggcctcccacttaggaatggcctccagtgatctcaggcacctcaatctgtgtgaacatgttgaaagtgttaattagcaagtgtgctgcgcttttgtaaccctgttcttgaaggtctgcctgaggggtttaaaaaggaaaacaaaaaaagcagcgaatggcccctctggtacagtgacttggagatggggttcatggcgaaccccaggatcacagcgggaaaagactctgagaacaacagcaaaacccccggaggcttgacggctacaggccccacatggggccgcttggctctgaaccaggctgagggtgtatgcagccaccacaaagtcccgtccctcacccctgcgtgcatgcgagtgggtgtggtggcatcacacccagagaagcgggaaggggcccgggggtggctggctgggggtgagggacggccctcaggaagtctgtctcagtccttggctgacaagcctgacctgaagcaggaaccagggtgtctggttcataggccctcttggaccatgactgtggccaacagtggactcagcctagctccagggaagctgctggaagggtaaggacggagcagtaggaggggggcctagccagccccaaaccccgcttgatgtacgcatcatggaggacacttttgggtcgaagacacggaacaggacaaccaggggacgggagctgtctgagaataaaccaggcctggcctgagctctgcctgtggctcccacctccagcctgtgctgcagaaccagctgctggaagtgggcatcagggcctggcctgcccagctcggtgaggacaccgggcctgctgctcttgcccgaagagggcccacgctgtgccaggtggccactgcgagagagggaggcaggggcttacactgtgatcattgcaacgcagcacagcctcggtcagttccctgtgtgtgtatccatgtgtgtgcgtgttgggggagtgctcatatctgggactgtggagagagggatggaaaaggctggcctcctcttagtaccccccacccttctgcagtacagctgtataatctggctgccctggaccagctctgattccccacaaaatcccattcctagaagctaaaatatctctggggtgtcttcccccagtcaaaggactaaaacccagagcaggccattgcagcaggcgcactgctctgggaggcgctcggcttcgggggaattctacgctgggctcatgctttagtttcataccttaggatgaagcatcgtggctttcatgttgggataacagactgatttattatttaccgaacgcagtaggcgctcggcagatcaatttcaatacaacaatggactataaatgccaccagcaatctggcagtagcagtaatcaacaaaacatgttgttctaaatgctgcataataaattgactacaataaactcataattactctactggctacatttcaaagttagcactagaaaaatcaaatcaccaatttggacttggcattaacatcctcggatcactcctgcctctacagctgcagctgggagatgcaggtgccatgtgctgtcccggagggccgaggccacagcatctgggattatgccaggaccctctccggggcagataaagagggtcataaaggagcagtcacttcttctggggtgtgctgagcccacagaggagaaaagctcatggccacgtggctctggcacagggctctccagccacccagaagtgccccctggactgtggggacccactgatgtggcctctgccgtgagactgggttcccatgtcctgtcctccaggcccagccagaatgcgctacagggttaaagagctttagaaaaggtttcagggctgggcaccgtggctcacatctgtaatcccagcacttttgggaggccgaggcaagaggatcacttaagtccaggaattccagaccagcctgggcaacatggtgagaccctgtctttttaatattaaaaataaaaaaattagctgggcatggtggcttgtacctgtagtctcagctactcgggaggctgaggtgggaggatctcttaagcctaggagtttgaggctgcagtgagctatgattgtgccactgcactctagcctgggagacagagcaagaccgtctcttaaaaagtttcaggacaccaggtggtgtctggagccactggtgggtccacggtgtgggggcagggctgccaccccctctcctgctctagtcccctgctgagccaagtctgagtttgccaattctttccccaagtgcctctggcctcacacctgggcctggtgccctccttgtgtctgagttccttggcccacacatggggtgaggtgcctacatcgcaggatcagggcgaggagtgggtgagaaaatccacagagacccagaagaagggcccagtcaccttgtggccccaggcatgtaggaggaaagctgagctccgctctgaccctcccagccccgagcacggtggctacgcaggggggactggggactcgcccaccatttgtggggctcactgtggtgccagagtgaaccaggatccgtggagccagtgctgtcgggtaggccagggagtccactaaggcccagcgcgcagtgggtggcggttccactggcctgcctccgcttgcaccctcaacctgccgtgttcctaacacagccctactgtggcggcatatgctggccccacccaaggtctgagctgagctcctgccagcatggcctgagctggaacagctcatcagctatggacctgggtgagcggggagcccgggcagtctcagtaggccatgtgcccaagggcagggaggaccccgagactgagtgtgttcctgcaaatactcggccctgacagctcaacgctcggcagctctctgggcagctggttgtctgtccataggtctgggcatgtgtgttcctgtccttcagtgggcatggctggggactctggggggtgggctcccacgactacctgctgtagggtgaggcggggtccaggccggtgagcagccatcatgggaactcccgctggaggagctggcacattggggtggctcctcgatgggaaggcggaggcagcccagctgggcgccacgcaggcctcagaggacatgccatgctgctggggggcagagggctctgcaggaggcttgttcgggtgcatctgccatagaagaaagggcaccaaagaactgggagggacaaggcacatcctctgctagtcagtgaccacagtgaaatgtctggaggccaagacagggcctgcgtggctgtggctgagccccagggctccagcactggggtagctctcaggagctctgcactgcctgggctggccctggctgacatctgacgtgcagggcacaggcaaagaacgcggagggactgagcagaggccaggctgcaagtactcacacacctcctccctgccccggggcagcggcccagctgctctgccctgcacaccgaggggctgtgggtaggactgcaagtcctccaatgagagaaaagactacccgaggggcggaggccgcagggcctgcccacatctccttgtcgtggcttctatgaagaactgtgagcacggcacatcgtgctcaggaaagccctgcacgcagccacgggtcagcactgctgacttgctgaacgcagggccgcagaggccacgggctcctgcagcaggaggatggcaggtttcagagcgtgggaggctccctgcggtcttcccagctccagaccaagaggcctgccctcctggcaccaagacagaaagatgcgagcgtggtgccccctgaacggagaggacagcctggacagaggctggggatggttcaggccccctcagagagcccacaatcccatggcccacaggaaaccatcgggggcccctctcctgcaccctctctctcagtgctccctggggggtgcaggcttttggccctggagaaggcaccacgcaggccgatagccttggcagagaagtctgggccaagaagcccagggacttgctgtggtcagccctctcaggacagggacccagaggcttctgggccatcttgaagttgagtccaaccttggcctggctgttcacacacagagccagggccgctggccctacttaccacatatccccattctggatcgttcggtcgttgggagctccggcgtgtccgtagtgtagcacggctgagttctcaccactgcaaagagccgggggagggtgatcaaagcccattcttctgcagcaggctctgaaggagggggtggatgctcgatcccctgcccatgagcagcactgtccccacctccagcacaggcccaggcgtggctggaccaggtccacagccagaggtaaggccgggggacatggtggccctgtcaccccgcagtcacatggctggcaaccagcctcagtctgcaggcagagcctcctggctgaaggcgtcgttaggcggctgccctctgggctgggatgtgggcatcatgtggaacacatgtaaaacttagcaatgggccgggtgtggtggctcacgcctgtcatgccagcactttgggaggccaagaaaggcagatcacttgagcccacaagttcgagaccagcctgggcaacatggcgaaaccctacctctacagaaaatgcaaaaaaaattagctgggttaggtggctcacagctgtaatcccagttactcaggaggctgagctaggaggatcacctgagcctgggaagtggagactgcaatgagctatgatcatgccaccgcactccagcctgggcaaaagagggagaccctgtctttaaattaaaaaaagagcaaaaaaggggaacagcagttcctgggcctggagaagggccctacggaacccctcctttcctggtggccaaaggggagagggcctctatggaaagggccccggctgtcctggagctgccctggcgtcctgaccaggctggagagagaggaaaccaagaggatcctcgctcctctgcctgagaaggcttccctaatgagcgatgcctttaagaaaaaaaggacttttaagtctgtccaaaggggggaaggaaacccccacctgggtgtaatatttatggccctgctcaggagtcttgggaatcataaaagtagaaataatggttttctctccatccaccagagaagaacatttccaaggactgagatttcacatgtattattcatgtgccggggacgtgcgcattggcagagctgcctggctccatcctggccgggcaggggccagacccgaggggcagagagcagggagactggctgggagagcgcaggagacgagggggccacgcccacagccaggacgcatgtgggggcagacacaccccaagggacacatgccgctgtgcatggcccacacagcatggcaatgatcccatatcactgtcatttctaccatgtgtgtgcctccaagcacacccagccaggtgttgatggcacacacccaagcgcacacacccacacagagccctgcccctcggcaccatgtgccacgagcaggcacaccaacagtgacatgcacacccacatacagcagcactggtccccacgcagccacacccacatagacacaccaccaccactttctgcactgacccttccacactccacccctgctgcacacagaagctgcccagcctgagctcacagcccggtccccacatgctgtgtgtgtgcccgtgtggaggagtggccttcctgtgcttagctgctgtgctgaccagctggggacaggagggaggggacgccaagcagcccctctgcagtgggcaggccatgctccctccttcacccagtgccaggtcctgcaggcagaggccacctcagctccgggagtcttgggagggaggagcgacttccaagcttgggccgggcgctggtgtgggcgtgtgagtgagcaagtgtggctgagctgggggatggtggagccccccactcactaactgccctacctcctcccactggtcacccccaggggagccagggtgccccgcttacctgccgcagatgcaggtgtaggagctgtggcgcatgccgccccgggagtagcagtagtgctcgaagaggctgcagggggagagacgcgtcagggttggggcactagagcaggcacaccccactccacgagccccatgaaccccaagggaaggccctcggcccatggtctcccctgccgtggccccacaatggtccaaactctcagtgtgagtctgtgaggcttacagcctgggggtcagtcataggctgcagaatctcagaggccagtgtggagtgacagagaagctgggggcccagcagggcgcagccacctgccagaggagctcgccagcctccactgactgccatggcgagtggcttcccaggcacatcaggacagatgggactcctggagcctgcgccctgtgggaagccgggctggggcagaggccacacatttctgcagagctggaggaagtgattccctgtgactccgtgcccagaggccaccacccaccctgccaggaggggctggatctacggcctgcgctcacccggggagagggcacaggagctatgggcagaaggggcaagggacaggcctcctgcaggtggggcagggcagggtggtctccagggatgtgggagaggcaaggcctggggcacacatcctgcttctccctccttggaacgagctgcctgctggctgggcccactctacaagctcccaccctgagcgggtagggccacagccaagtctggagagaaagacaagccctggccccaggctaagcccagaacctgcaccggggaggcctctaggatggcggatggtagcacagtcactgcatggatctttgagctccaagggactgagccattctgccttggtcttcctctactgaacccagctggtgaggggtgtggtcgtggggagctgccctcaccccctccctgaggcctcggcaacagctttcctgccggaccacagctggtccacctgccaccacgtgagacaggcccaggtggcccccacccgcccacccccgaccagggcagtcgttgcggccgcccaagggcacgccacatggcggtcctgccctgcacgttccaggcctgccttagagaacgtccatacgagggagtttcatcttctaggcactgtcaacacaaattatgtataattgtcatgattggatattaagcagttgttatgcaggaacggctgtggtagattcaatgggctttcagacttgccttccaaacctcacaggataattgggtatctgcgagtgaaatatttcctgaaaagaaaggatttcaggagctgccagggaagcaagaaagccacatgctcctctcctcagccgcccccgtattcgtggtgcaagcgctcaggaggccgcttccacctcgctcctgggagtctcagcgctgagtttcgccacagtccaggcacgttcctaccaaggcaggcaagggcagtgccccacatggcaagccctgtgcgccaggccagacaggcagcctcagaagccacttcacacctctgtggcgccctcccagaaagcccgagaagaggcctgacccacgccgtggaacaggggtgctcccttggctttgtgagatgtggtcctgcaccaacagaagcgaacctcagaggtcacatggtcattctcgacgtgatggcgacagcggacctctgtgggacaagtgacctgcagacaaccacgggctgcgctgggactggccggcttcagaaaagacaggcagagggacagagatgccatccgcatgtgcagaggaactcacatattctacaagaaaggagcggcaggccgggcgcagtggctcacacttgtcatcccagcactttgggaggccaaggttggaggactgcttgaggccgggagttcaagaccagcctgggcaacacagcaagaccccagctctcaaaaaatcaatcaatcaatcaatacaagaaaaaaacatcagaaaggggaggcagtgaggaaacttggctctctcgcctgcagcaagcttccccctgcataacccactcagtggagacaactgtctttgaatgcctttgctgctttttaagaaaaaaatagtgccttcaagaaggcacagctcacagaagcatcaaactaaagaaaggctgacccagttttcacctgcaaagtgcagcccgacactggtcacctttgccggccacgttgacaactccacacactgttccataggaaggagttgaaaagaggaggagcaccacgtgctggatattcacgcccgcctaaaaaaagctgaaatgcttcacagtggacttcagtcctgaattttgttttaaatgaccttttctgacgcaacttgaggacacactggtgctttggtggcaataacaggtgggcaaaacgagcccacgttttctgcagactttaggcttggggtgtggacgcacaagggcacccaagttctgggcagctgtggcggcacagggggcctgtggaagcgtgtgagcccggcgcggcacagttctgatcttcaagcggtgagcactgaggggtggacattccaaactggggcccatgcttgatgcggacgcaacgtgtgcccccgcacagctgggccagagcttggcgagtggtgctgggatgaccaggagcaagtgtgggctatgaggacaggctaacagcctgtcccgtggatgaccgacatgccatggcagtggcagcatcacaactcctccaagtgcgaggcaggaggggtccagccaagtcatccctggagcaggctagctactacccacccaaaataattaacacctggaacaggctctccagcagagggcagcagccagcaagacaggcaggagtgtcaccgccccactgcgaccatctccataggctccttccataaatttatgactcacatcgtgcagccccggaccagctgggtctaacagcccctgctccctcctgctcacctggaaggcggatggggtggtacacacaccccagccaggctcaagcccagcgcgcacctcctccccagcagcagggaggggcttcctgattggctgagaggaggccgtggtctgcctaagtcccagccaacgacatcccggctgctgtgtgggccccgttgtttttccttatgtggccattcctctaacaccctcacctataaatttctcccaggcaagactcgggtagaagaggcttgtatccaggcataagtgagagagcccttaagcaacctgggggaactgcatgagtggtgaataacgaggtggatggagttactgcagtgtcagtggggcaggcacatctgtcagtgccaggagatgacaaatggggcaggagcagcaagttcccagacccagatctgcaggaatggggtccccagagacggcgtcgctgggcctcccactgggacccacaaatccagcccgtggagcgctcccgggcacacggcccagctcctgccctcagaagtttatcacctaacatgaagacgagtcacagtcctataaaaatgctgcagctgcccagacagcggtagaagggctgcctggcagcaagtgtcggccaagctatgtgcctcgagcatgggtggggtagcgccgaagaggttagtgaggcagtgtaaggggtggccctggccacatcattccctttccccggctgggcctcaatggatctcaggtactcaagaggtggagaggggaggctgggccggaaacagaagcttgggagtgaaaatgcgcagagctggtggagccccctcagctgggcagagggcttaggaaagcaggtagttgggacatggggttacaaacctgaggtggggagggtgtgttccgcaccccggtccctgtgctgggctccctgctctgggccccacatacccagccttctgggactcaacaccaacctcaagggcaaatcttggctctgctgctggccagctgaatggcctctccgtgcctcagtttcctcatctgtaaaatggggatgatagcggtgcctccctcccagggctgctatgccagtcgaatgatttaacatacatggagtatacacaatggtgcctggtacccaaggagctctgtgtacagtgacctagccatcgtggtcactgttcagaggcctggagggaggctggagaatggggatccctcctcaggcagcaggagaggaggtcgtgggcatcctgtgccaggctttgagaaacagcctcttgactattcctttaaaaccaaacagaatctgcataggtccacggcccggacacccactcccgcaccctccaggcagccaagttctctacagaagtccttcctgggcccacacactcccagcatctccaggatgttcaccagcaaaaacgcggaggtgtgtcctctgcaccagctaccgggacacgtgcgcacagacaggcttctggctggacagagggggcctgtgcccaccatcccttcacagctgcccctcgccctcacggagctgacccagggtccccgccttcccggggtgcgcccaggactggggcacataagagggagagagccacagagagtgagaagtacctcatgatgtttggggccaagcagttgtgctgtgtatagtcgtctcagcactaagttgcttataattcacatttattttaagtaattgctgcgatattttctgggtacacatgaccataattgtgtcattaacgtgatacaccacttactaagggaaaatccttttcagagtaagggccatacagtcctgcaggggatgccctgagacacctcaggccgagcagagcgtgccttatggtccccaaagtgggagcagctactatggaggacttggagccaaaaccggatgtttctaccagtggagccctggcatagctccttttgcatggaaccagaagcacgtactacattcttcttgaattcccatggaaggaggggagctgctccacgcccttcttctggggtgaccagtgggtcatcagaaggcacaggcgaaggcgcccaagccctacccttggaatcgccgcctgggtggcaccagcgacctatccaggaccccaactcccaggcaggtcctggctcttttagcactgttccccgtaggtcttccaaagagcaggtactgggacttggcagtgaactgggggactgctgcgtgcctccccttccccaggccccagcatgacgacaaacacagacaaagctaggaatgagcaccctctgaggctccgagtgcctgaaatgagcaagaggcattcacgtgatgtgtcaccaagaagggactgacctgaagcctcggactaaagccagaaatgcatgattaataaaactggtgctagcggagagctggtcagcatcaccgtgtagccggcaccaacatggcagcgtcagacacaggccgtctgcagcagatgcggtgctcggcttcagcagcttgctctgctgcccggagctcctcactccctcttcctgccgctcctacaccagtcctggcccacagacagagactgtttgacctggggcaacaccttcccaccagggcttccagaaggccagccagcatggtcacagggtatatggggccaggcttcttgggcttgcatggaccatctccatgtgggcaagcagatgaagtcacactcctggagccccactgctgcccagatcactctccctgactactcagctcctgccagggagccccacaaggcactgcactgtggggatgggtgggcagactgattcaatccaggccctgctgcccactcagtctgaggcttgaggcaggttgtgtagctgctccagtaagaaaaactgaacagtcaactgcagcatttagcatgataacaaccctttgggggctgagggatcttcccactgcacagaggatgctgcagtcagaacaatgacgggctggggtcaggaaacccactgaatccgtgttcgggctcggagtccacgcagggtctccgactgcaaagcttatggttttgacccggatgcctctgaaacctcaggtctgtcagtaggtgggggctggaacagtgctgacctcggggcttgctgtgaaggctgaagaagatgcagggaaaagcttcaactccataaacactggcagtgggtgatgccatggctaacgccttccggagccctgaccttgcacccatgcacaaggccagaactgagcagaaaagggtctgcaaggacaactggcccaccaagtcctgggcgaaggagccccaggccagccggtggaaagcaggagctggggtctgagagaggcctgggatgctgaggccccgcccagaaggggggatccgccaatcacaggcaagggcagcggccaagacagcagcggtcacagcaggaggaagagacacaacagacaggagcagctcactctctctctgagagctgccttatcaaggcacaagataattagcattttaattggataattgggaattctaaattgcctatcttgtattaagcataactgaggacataacatgacattcaattaacaaatcttcccctttattttcaacgtgcttgattaggttgagtttcggagttcctcggatcagttacggataaaacattctatctccttctccgtccccaagcctggctcatcagactgtaatatacttatgttttatatgtacatggagaagtcttagaaattctctgcacaaagaaaaaaagtcactgatcgtgttaacacccagaggtcttctctatccaatattttgttgaacattcttccaggcattttttttaaaggtataaacacagattaatatttaataattattttaaaaataattagctgtggccgggcgtggtggctgacgcctgtaatcccaacactttgggaggccaaggtgcgtgaatcacctgaggtcaggagttcgagaccagcctggccaacatggtaaaacccgtctctactaaaaacacaaaaattagccaggcatggtggcaggtgcctgtaatcccagctacttgggaggctgagacaggagaattgcttgaacctgggaggcggaggttgtagtgagccgagatcgcaccagtgcactccagcctgggcgacaaagccagactctgtctcaaaataaataaataaataaataaataaaaatgattagctgtaattaaaaaaaaaactcacctttttacagaagtgggacatacatacagaaaagaactcaaatcctacagacacagcacaatggcccagcacaacttgggcacgcctgtgtgcctggcccccctcctggtcagtctctcttccccaggggcagcctgactcctatcaccatagattagtttgcctattttttaacttcatgtaaatggaatcaaacaatatggtctcttgcgttggctgcttccgctgccacaatgtttgtggacccgtctaggtgggcagcagtccctggttggttctcactgctggccggtgttctactgcgggggtgggcccccgtgtgtttctccattcttctgtgggtgagcgttcgggttgtttccagatcacagctattatgggtagtacagccatgagttcttgtacagtcttttggggcccatgcatgcatctctggttgagcaaacagccaggagtggaaatgctgtgtcacagggtttttggggggtcagctttagtagacaaagcccaacaggttttctgagtagtcacatctttgtggtcactgtcctgaaacttcctcctctccatacctgtgaatggggcccaaactgggctgaaacaagtctgcaaggacaaacagcctagcccggtccagcgcaggggctgggctgacccactgaaggttcttgttaaagcaaagaacattttccttatcaacagatacatgtatgtactttttatttttgtttttcatttttatttttagagaaagggtttcactctgttgctcaggctggagtgaagtggtgcaatcacagctcactgcaggctcaaagtcctgggctcaagtgattctcccccttcagtttcctgagtagctgggactacagacatgcaccaccatgcccagctaattttttttatatgttttgtggagatgggagtctcgctacgttgcccaggctggtttggaactcctgggctcaagcgatcctcccacctcggcctcccaaaggtccggtattacaggtgtgagccactgtgcctggcctatttttatatttaatgctgtcactatgtccagaatctgaccacttctccgcaccaccacaactccctccctggtgcaggccaaggttctctctcccctgggagatggcgatggtggctggggatggtgaatggtgatggtggtctggctggcccccctgcttcagcccttgtcccctacagagtgtgctccacaaacggatccttccacaacttaagtagaatcacaggactcctctgctcacaccaaccccggcttcccatcggcagcccacctcccccttactcccctgtcttgtcttgtcttcttagtcgaactccgcgctgctcctggaactgccaggcaagttcccaccaggccactggaacagctttttctctctgcctggaatgtccaccccagaaagccacagcatgctctctctcccccttcaggtctctcctccccttcacagggaggcatcctgagtccctggataaaggtagctccctcccctgtaaccctcaccaccatctgacatgtttatctagctatcccatcaatcaatcaatcaatcatctgcctatatctacctacttatcatccatctacccatccatccatctatccatcactctagatctacctacctatcatctacctacctataatctatctacccatccatctatcactctatcatctacctatcatccatctacccatccacctatccatctatcatctatttacttacctatcatccatctacccatccatccatccatcactctatatctacctatctacctaagtgcaatccaactacccatccatccatccatccctctatcatctatctacctacctcctacgtacctatcatccatctacccatccatccacccatccatccattccatctaccatccatctacccatctatccatccatccctctatcaatcatctatttctgtcaacctacctacttatcattgatccatccctccctccctctatctatccatccatccatccttctatatctatctatctatctatccatctatccatccatccatctctctatatctatccacccatccatctattcctctatcaatcatctatttctgtatctacctacgtatcatctatccatttatcactctatctactcatccaatactctgtcaattatctgtttctatgtctacctacctacctatcgtctatccatccagccatcatcctatctatccatccatcatctatcaaggtgatgatcatctatatcagcctacatacttacctacttatcatccatccatccatccatccatccatccatctatccaaccatctctagcctcccattaggcttgagctttatctttttgttcactgtagtatccctcaagagaccagaacagtgcttggcacatcagaagtctttggtatacctctgttgagtgactgaataagtgaatggctgtatgagcagcaccacagcctctaatttacttaaccaacttcctgctgttagagatggaggcttcttctgcctctctgtatgatggccacgcatggccttgtgcctcttcactgtcctcgggctaaattcctagaagggagattattgaccaaatgcacatttccaattctcagggcatgttctgcaaaaaggacccctgaacactcataaggattttggggtcctgagcagcacactgcaaggctcgtctgcccacaggaatgggaacctggtgggtaaaacacaaaagtatttcactgtttcactgatgaactgacaaattttaatatgcttatatgtctacttcctcacatttcttcctttctgaatggcttgttccttttttaaaaactgcgaatgttcatcattttcttattgatccttaagggatttatacaggaagaacacaggcagtggatctgactatcatttatgtaacaagtttcccctttgctccttaattttctttatggcatttctggacagataatttacatttttattggctagatctgttacatttttttctttatggcttcttcctttaagaagtcgttccctacccctatgattatataaactctatcatcttttgtgggcttcctgtttgcacatttacttaatcaatgaacctagaatttattgtgatgtaggtcatgaggcagaatgccatttgattattttctttgctttcactaactgccccttgtgcgctggcttggagcaccatcttgttgaaagataaatcctttacataataagggtggttgggggctgcgcctgtcacctgctcctgtgctgggacttcccactgccctcactggggctttcagggcaagtccaccccctccccaagcagctggccctgtagtgaccccctccagtaagtaccttctctactgattcccaggaagaaggacaggacaccagaggcagaacttgactggtgcctgggaggctgacaacacagaaccgaaagaaattcaaagctcgcagtacccgccttgagggaaattcgcaatctgtgactctagacctgtgtttggcaccttgagccagcgagggagctccggctttggaaggcctgggaagagctgtgtaaacacaagcaccattggccaactgttctctgacttattctgggatccacacctgttcgcgtctgacccaatctcactaatccatgctgactgtagagatgacacctttcttggccctagaacaaaaactcccccttttaaaaaggaccagaaggccagtgtggtggtgcatgtgtgatggtgtactcaggaggatgaggcgggaggatcgctggagtccaggagtttaagcccagcctggacaatctagtgagacccggtattcgtccattttcaagctgctgatgaagacatacccgagactgagtaattataaaggaaaagaggtttaatggactcacagttccatgtggcttgggaggcctcacaatcatggtggaagacaagaaggagcaagtcacatcttacatggtggcagggaagagagaaaatgcgaaccagtggaaggggtttccccttataaaaccatcagatctcataagacttatttactaccatgagaacagtatgggggaaagcacccccatgattcaatatccacacagccaaaccatatcagaccccagctctttaaaaaaacaaaaaaacaaacaacaacaacaataaaaaccaggttaccctcagatacatccagagaggctcaaaccacatgaccaggaaacaaaaagaattgccagaggccaggtgcagtggctcacacctgtaatcccagcactttgggaggccgaggcgggtggatcacttgaggtcaggagttcaaggccagcatgaccaacatagtgaaaccctgtctctactcaaaatataaaaattagccagtcgtggtggcacacatctgtaatgcgccactgcactccagcctgggcgacagagtgagattcagtctcaaaacaaacaaacaaacaaacaaacaaaaaggcttgccagagtggcagatgatcctagttcaacacaacccagaggccacattgtccctctaaggaacgctggcaccctgtctccatcctccccaggaaggtgtgggggaagcaagccaggtatgcagggagctttctggaggggcgagcaggggcaaggggagggaaggggctgcttttaagttcacatttcccaaagcacaatacgagtccacgggatgacattatgtagtaccccactagcatatttccttcatgcactaggtatttatcttgaagcgctaatgtctgttaatggcaaattagattgggtttcattcatgacgaggataaaaagcatcttaaaacatatatttaaaggaaaaaaaatgagtcaattgaaagaaaacgattaagcagataatagtagaggtgagacaagaacttgaccaaaactgccagggtgtctcatggaatgactaactctgggagatcccgccttaaggcttctttgaggaaaagcctggtttttcgttcttgggcaaggcctttggttcagaagctccccaagtccccagatggcagcctcaaactcctgggctcaagcaatcctcctgcctcagcctcctgagtagctaggactactggtgtgcacaaccacacctggctaatttattttattttattttatatttgtagagacagcatcttgctatgttgcccaggctgctctcgaactcctggcctcaagtgatcctcccacctcggcctcccaaaatgctgggattacaggtgtgagccactgtgccaggcccaggttcaatatttagggaacacatgtttggcagaggatctcaggtctcatgtcactgcactccagcctgggcaacagtgggagtcacccagatcccaccttgtagagtgaggacagaatccccaagtcaccccttctagaaaaagcaagtgctttgctttggattccctctagggcatttttctgttttgtcttgaaagagtccagcactactttatttctaaacatcaaattgctttttcagccttacaatctgaaaatacttcacaaatgtgtcgtttcagatctaactttctctggaaagtgctgtttcctatcaatgtctttctaaagcactgtcgcacctgggcccagctctgggcagcccctgcaactcactcagttcatcctgagggtctagtacccagttccctccctatcgtcctctgctgagggctctggagaagagaggagaagcagtctgtccacatggactcacagccactctcggtactgtgagcacaggacactggatacagggacctggtcacccgggaggcagcgccaagccagtggtcactgcgcagcaggtggccttggctaccccattaggctggagggaaccaggaggagctgggtcactgaggaaacaggaggagctgggtcactgcagccccagatccccagcacctgcaggaagcgaggaccacagatgcctgtgaaagacgtctcctctctgagaaggttcttccaagcatccaggaaccacaaggcccaggacgcagcgaaatgtgccatggagggaggcccagacaccatctgtcagggccagcctggacaggccctaggtgggcagggcccctccaccgcgtgcggctgtgttttatggcagcgaaccggctgttaggcgtgaactgccgacaacccctcttctaatgagcctttccatcctcactcacgactccaaacgttattttagtcacacttggctgaaggaacaacaggaacgctatttatcactttgaaagtctttatctacttaagatgatgaatgggggtggcagtcacgccgcccctacagagagcagccttgagaagaggagtgccttggccagggatgcactccaagcatggagctggggaggcggaggctgtcgtggctcatggcatctctagcatgttctgcacctgtgccccatcggggacctctcagtgcggatgccaccatccaggtcctcagcaccctctcgtgccacagagcacagaggtaggagatgggggaagtgggacagccccaggagccccccatcggtccccacctgcagcaggatgtccactttggctccacagaggatgggaggggcgatttaagaaccaactcacatgtcctaaacctttgctgctgacatcccagagacacagggcaagttccaaaaaatcctccaatcggaggatgccaggaataactcttgcaaattcaactttggggtagcttaaacctatttatcaatagctaattaataaagtctaagtctttggatgacaggatgattaaactggtttttaaataatccatttttaattaaaatgctaccctcttttggcttctggatatattcaaaaggaagccttaacagatcttgtttttaaatatacattatacgaagccaataattagaagaatttgtgcttttaattatatcttaattattctttgcctatcgatgcaaagttaaatatcctttctttatgacaccaacactactccccaaagccagtagattgctagcaggaattgtgtgtgtgaagcctgctcccggagatccgtgcagcagtgacggtgcctgtaggcaacccatacccccgtcctggcaggcggcaatctgatcatggcaaagcactggctctgggcagcactctcctggcccccaccttgtaagagacacgcttgaagacagaagtggtcgttatgtgatgagggtctgggcccccctcctgcatagccaggagccaggaagttccttgactttactcgccagcctgcacacactctgaagcatctcgccagcgccacccactgaaatttagaaaattcgcacagtgccaaggagggcttggaggatgcagaagagggagtcacgcccgtggatgccgggtttcctgatgtgctttgctgggtccccgcagggagcccaggcatcacacacctgtccagcataccccgagctccctcttccaggacccacagcaacacctatcccaagcccacccacttctagcaccttctatcggacaccttccacactgaccctcaaccacctgccagtctttaacaggtcccctcctggcccaccttcccaccaggaggtcatggctagaggggtctcagtggactcctggcagctgctgcccttcaggagctgggaggatgtccacgctccacctcctgctcaccgccagttaccatccaaaaccaccgtgggccaggctgacgcccctctccagaaatctccctgggttccccaaggggcttctcccacctctcaccaccaaaagccctctgtaggcaagtccctccccacacttctacactgcagaactttcagcctggcaccctcccgttccctcccagtcttgaagggcactcctagaggcaggcccatgtcacccatacccaaggctggccacagtgatgagcacacagtaggtcctcagtaaacatgtgaagaaagggtaacggatggcaggaacagcaggcctgaacatgcccaacaatccaaagaacattcacacatacatgcacatatgcatatacgcacacatccacaggcagccgaaaccctgtctgcccaggcagccccgagtggagatctagccctgtgttcactctgcttcctctttctgggcacatatcttagcctccctgcagctaggctgggaccataggactgactctcatcccaagaggaatatgaaatgacatgtgctgcttccaggccatggcttttaagagtgggtgtgaattcttcatgttctctctcttccttctcagagggggcagagttgggcagtggaagcagccctgcatccctgctggaggagagccactgggccagccacagatggcagcatgagcaagaaatgagcctttaccgtgctaagccaccgagatctgggtttctgttgttaccaccccaaaggctaccctatactgactaatacacctgggaatttagaatacagcaaaaatggaattttacaatggggggcaaagacattactccaaagacaacaggtcacttagtaattacgcgggggcagaaaagccagaatccttgtttatatattattcttaaatgcagtttagctcaattaacgtattaaatataaaagacgaaaccatgtggatacacagatatctattaaactatacacagcagtgtttgaaatatttcataattatgcaaaaactgttatttaaaagaaagtcatcagactataaagatagaaaaaacatgctgataactggattatattgaggtagtagaaaaagcaatttcgcaaaggcataaactatacaggaaaggaccaacatgacaactgatatttacaatttctgtacatcaaattgggaaaaatatttccaacacacagaacaatagtacaaagagcccaattacagagcaataagtcacccacaaatgtcccgattgcaaatgggcaaaggactgaaaacccacaaagataaatgcccaagaaatacttacaagagaagtttaagctcgtcagtaatcaaatcagcaaaaataaagacggggtattacttttccctaatcagaatgataaaggtgaataatggaaataacacaattaatcttgaggcctgggtgggcacaccggcactcatggtttgggaggaggggtgtcctgcacgctggctgagaacatggcttctggagagaggccacctggctcctctaagacccatctgtctactgtggggtctctataatgcagagaggatgccacactcctctccgctccccctcacgggattaaatgagaacatccccgggaaggacatggtatctgctcaccagacactaacccagccccagccgtgaagggagaacaacttttctagatggcactgggctttgggcatcaacatttttccagcaattccatttgcaggagtttaccccaaggacacggtcagtttgacacccgagagacggcgaggtagggttgacggtcgaagtgtcgttcacactgggaaccacctggcttccgggggcagtctgggtaagtggattatgatgcagccccagtgtgccccagttcactgccaggaagagacttctgctgcaaaaactctgcccagtgtgagcccagcagatcaaagcccgtctgtctgtgccccagagagaccggaagcctgtttgctacagcaataaggttttgtgtgcctctgcatcaaagggtttttttcctatcttgtttataatgttctgtactgactggatttcctactggcatatgtatctttttatcagagtaaagctattttcattttgaaaacacttttgggaagaaataaaagctacctgtcaaagacctgctcccctcgccccagcctcgccccactggccccagggggcttcttgtcctgatgtgttctgcccagtggacacagcgcacactccccaagcacagctgccaccgaggacgacactgggaagctgccaccagaggtcgcaagtgcacgccgtctgccacgcacacagagctccttgaaaaaccttcagcctggctgaaggaaccacagtgtatctctgttttgataccattgttgtggacaaagtaaaaaataagcaatccagccaggtgctgtggctcagcactttgggaggctgaggcaggaggactgcttgagcccaggaggtcgaggcagtgagctatgatcgcaccactgcaccccagcctgggcaacagagcaagatcctatgaaggaagggaggaagggagagaggaacagagaaagggagagaggaaggaaggaaagaaggaaggaaggaaggaagggagggagggagggagggagagagggagggagggaaggagggcaattcaagcccaattccttcccgaaggaaggaagagagggacgaaaagaaagaaaagcaattcaagcccaattcctccctgactctatcaggaaactctaccatgggttgaaatcacccaaaatctgaatgtccaggtccccgccggaggccagggctgggggcccatcttcatcatcccaaaactcatgtgggaaatttccccaagaggagacagaaaacaaagcaaagatttcctctcttcattccgcccaagacaaagcatctgaaattccactctcgatgtttccttcattatctcccactttctacctctcctttttgccacagggggaaaaattcttcctgggaaggacatcctcggagacactcccctcccaattaacacccatctggcagcacctctgcctgaagatgggtagcaaatgctagtggagggaccactctttcctgcttcctggcctcatgatcaaaatgggaagattaggcaggtcgtggtggctcaagcctgtaatcccagcactttaggaggctgaggcaggtggatcacctgaggtcaggagttcaagaccagcctggccagtatggcaaaaccctgtctctactaaaaatacaaaaattaggcaggtgtggtggcaaatgcctgtaattccagcttctcgggaggctgaggcaggagaatcgcttgaacctgggaggcggaggctgcagtgagctgagatggcgacactgcactccagcctgggtaacagagcaagacaccacctcaaaaaaaaaaaaaaaaaagggaagattaaacccagagtgaccattacgagtctaagagtcataggctgaagctaagaagtcttcccaggtaagggccactctgggaagaaagtgcagccctatcccttcctccacccagagctcctgagctgctccactgcaccggcaggtttggaagcaagctctgtcggcaaggctctctggtatgcagcctggagaatccaagcccctagaaggcctgccaagtcctgcttcaggagcccacttagccttcttctctggaatcagattctttggcaaaacctctgtctgcacacggaggtatcccttttgcacagggagctagagaagtcagagactggttggaaaacagccttgcttgtctcctctggctaaacactccccacacggggcaccccaccctggggaccacccacccaagcaaaaggagcccaccccaccccaggggaacaccgacagctcaggtttccactgcagacaggatggggcagaacccgcagctctgaagagccgattgaaaaagcaaatttccctctggtgctctcactggaaaaaaacatgatagctctctcccctgggagcaggaggaagcctctttgtccaggaggactgtgctgttccttggaaacgagcctgctgccatgaacagatccagcaggtatgggcaaatcacctagaatgcataaaacattacgttcgccaaatccccctggacagaaatctcggattcagcaaacagctcagatctgaatggatttccactcacagctttgaaatcccccaattaaaggcacaagcgcatggcaaagttggaagctttggcgcttccgggctcccagtacccacagcctggatggagatggtggcagtgacatggcctgggtcacatgcacacgccttccagaggcacctcggcctcctcggctatagcagctagcgggtgtggctggcctggagcgacaggctccctcactgccatgctgcctgcagctgggttcccttgagtgaaaacactttaagggaattgtttctatccctccattcctgaacaagccagtggtccccagggccccaggagctacacacccatttgcatgttgtccctaatcaactgcaatccatgtcaatcagggccttactggtctcgggcacagaacatgctgggtgatgcctcaaagtgccagcctccccagcaacttcactaaggaagaggtttctttataaaatgtctgcagtctgatggctggctctcctctctttcagtgtgagctgctgttttctccttaaactgcagagccagagctctcttctccctgccaagggggcacgcccactccacaaacacacaaggtacaccaaagcccttgagacactcttggaataatgatgcccactctgtacctccaggggacttaactaatttataaggcaattttaataataaccatatattaattttacatccccttttttacctatttcagtggctatgaactgttaggaattaggtaatatattacaatgggctcctggggtctttttattaactaatgccccatatttaaaaaccttcttgtcaaatgagaaacattaagaagcgctgtcccttttataattgcttctaatagactcgatattcaggtcctggcctgaacagagagcccaggcgatacttccttaaattgcatttaacttttcattttctttctgtcatcggccaaccgaataattctgcaagtgcacaaatggtcattttaccgtgtcggtctgtagctctggagatgtctgtaaatctgcaagttaggaggaccactcaggtcaagagatgcacagcgtttctgcccggagtctggccgcaggagcaatgcttggccattttggtgtgtgtgtgcaagcctatttatcaaaatatatgccagtaaaccacacccatcttaaatacccagattgatgacatctcacaaacgtgccccgtgggtgaagaccccaggacatttcttgtctcctagagggttcgctcaccaccccttctcttcccctctcctcctctgtcaccagttttgcttgctgggaactttatgtcagtgggatggtacgtgcctttctgagcctggcttcttttgctagacatcactttcagcgctgttcgtgtccctgactgtggcaacaatctgctcgttttcactgcccgacagttctccctgtatggacacccacagtttacccacccgccatacacaggcttggcatctccccagctctagactcctcccccacctcatgtgtctccggtgcacatggggcaggcaaagggggagtgtggggcgccaggcatggaatgcttggttttgtgtggacgctgccagctgtgtaacggcgatggttctagcatctctgttttctgcttttttatcccccctggcagagaagaaactttgaagctcatcactttgtgggcctaggctggaggcatcggggcacctcagtaggcccaggggctactgggcattcctccactgcaccatccctggcagggcaggcgggaatggggttctcctaatgtcaggattccccgcaggacgagggcgcatctggcctcccttggtctcgggggtgaacttcacagaaatggaaagtttatcgtgaatgaggaaagggcagtaaaacccaaccccatttactgggtggggagaaagctgccacccagggtgtccaaatcagctgggaaaggtcacgccctttgggtggtcactgggccttgggaacggggccagaacccagccaggtggagcagcagaagcctggcacatcacacatacggtccagccctcctcggtccctgaccctccctgttctgggagtgaaggactgagacagggcactcaggtgttaaggttggggggtggtggggtggagggggcaggtacaaacccctgaggacggcctggagggaaggcagctgggtagacagcagcctccatgcccagggactcgggaaagatcaaagtgtgagccggaatgcgatgccagaggaagacgagggatggaagaggcagagaaccttgggcgctggggaggccaaatgaggtggctgagacggtagctccctcatccatccggcatctccaggcagaggagagcaaaggcctggccacccgcggctgcccgaaagccaccaggatgggatcctttgttttcatttccaaacccaaaggcccctcggctgggccggcgtctgatcccgactcaaagccacagggagcctcagctgggacgcaacctgagggcttggaaaatggaggacccagagccagttttagcagttgatgaataataaatgtaattaacatgatggaaaacagaagctggaggcccggctgaggccccagagagtgactcatcagctgcctccctgtcacttccggctgcccgggcccctcggcagggacaggtgccaggaggtgaggggcgccgagcccagacgaaggacaactggggcaggtctggctggggacaacagcccctccagaaccaacccccctcgttcggtcccagcagggcctgccctggtgctggggtccctgggccctgcagcacgcctctctggcctcaggtgctgcgcttgtaaagtgggagtgacagccacgctttggctgttgtcctctgggcactgtgtgagaatctgctgatgctcgtatggccgttagttctcaatcacgacaggactgggtgtcagaacctcccagggccatgggcagaggccgtgcagcccaacccacgctcccatggcgtccctggattggtcactgggatgctcaggtgagtctgaggccagggggtgccctccaggctctcagcaggtcctcggccttcccagggctgtaaacactggtggaaggtgggggcatgggagaggcatactggcctccaagaagcggtgagcagggaagggtgtgggcagctgctggaggagaatatgggtctgaggttagcgcagcccagggctccctctgacatctctgcccccatcttggtttcagggcactgcttttggcctagaagagcagaggagaaagaagcagaggagtgggaggaggagagcggggagaaaagaagggagaagggaggagaaggaagatggaggaagaggaaggagagggagaaagaggaggaagaggagaaggaagaggaaagagaagagggagagggagagggagaggagggagagaaggagaggcgagcaggaagaagaggaggagtgagaagagaaagaagcatgggaggaagagaaggaatgagggtactcaccaggcagccttcccagcaggccccatgccctgcctaagaggcaggcgggagccgtcctcagcatctcccaatggccgagtacaggggtgcttctgcctcatcatgatgggcctggtctgagggctccagtcctgcctgggctgcaaggctgcatggctgcatgggctatgagccaagttcctgcctggcaggccgcactcgagagacccaccccactcccctgcaggggcagaggggctgggagaagaagatgtttaggtcctgccaggaaggtcctctcaccacaaattccacctttatgggaaaatcaatgttattacctcctccatcttcccacacttgctgctggtctaaagcaatcacctcatgggcactgagccagaactgagccagcgctctggggtcactggcctgcccacccctgccttccgggagggccaggaagggaattggttggagagagtcagcatgcctagctctctgggtgcgaagagaggcccctggggccggttcattgggtccgagcaccagccatgtgatgcctcgctcacagcactagcaaggcaggcccctagtccacagggaggagggagatcttgcttaactacaagagcgttaaagtccgatgaggcagaagccacagggtttgatggaagacttcctggaggaggaggaaagaaaaagtgggaaatccagagaagctggcacggaagaggagcagcaaccaggcagagcagccagtgctccaggggccacgggagaagcaaaacaagtgggggtctctgagaacacggcccaggagcctaaagaagagacacaccacccccaaccaccgggctccggccctcggaaaagctgtgttgcctggctctgcacactactctgaatgttagtgtctcaaaacagtcaactttttcctttcaagagtcttctaaacgatagtttaactacctccatcaattggctggcaattccacgaacaaatggttctctgcttgtctcgaagttcaactacttttatttgtccccaagtatttggcaggaaccagttgcatcaataaagaaatgccaattttcaacagccacacgagatgcaggggttcagatggattttgtgtcggcagacagggcgcctggaggagctgttattaacagccagaggagacacgggggcaggcctgggagacagcactccagaatcagactagattaagaagatactgtaggcaccaagcctctaagcatcataaataatgctaaaattttagactgtggttgaactctctgctgtcacaatcgtttagatcatgatgcgtttgatgttttatagcaagatgacaaatatctttctcaactgctaagtgcagagagcccgttggaataaatccaaccaaactgcccaccacaggtaagtaggtggtgtcattaggaggagacttgggggggcggtggtgtcagaaatgcctcaggcagtgatttccaaaggcacgccccgaccgtgcagttcaggccatttttctcaaccctcgccagtttctggcacataatctcattgttggaagaggcagggtccaaactctgaataacacatggagtctgacaccctggctctcccctcagcaacaatgaagtcacagcagagccagagaaagggacagaaaaaacaatgcaggaaggacaatgtggtgaaatgtctaaccgtgaaacaggagccggtgcatgagagccacgggcaattctcctgggctcctggaagtagccctccaatcacaccagctggctccctgcccagacacaggctgcagggatgtccaggaacccagctgggatctcagagggcagacccagggtgctgggtttctagcatggaccctcagctgggcacagagagaagagagccacctgcttgctgggcccagaacgactccccacagttctcccagggtacaggctgtgcccactctgcagggaaaacaatgcccatcttacaatcctgccctgcagggggccccagaccaacacagctggctatctcttctctgagccagaccagggtgactcttgtggttgccagaaaatgccaactgcgggacatcaagagaagaggcaggtccaagggtctctctcccctgccctttgccttatgaggtctgatgccaagacctacgtcagggcactctatgcccccagtcttgccaacggtgagtgtttccactacccaggactggagtggccctgaggtgatggggggcgggcagggttctgctggaagccgacagcccaaccctggcaggggcagctgtccaggaggaaaatattctccccaagctttctcctcctcggagctgaactgtgacacctcagtaccaaccaatggcaaccctgggacaaaggagtgcttcctgcccttttgagacggagtctcattctgtcgcccaggctggagtgcagtggcacgatctcagctcactgcaacctctgcctcccgggttcattcaagagattctcctgcctcagcctcctgagtagctgggattacaggcacgcaccaccatgcccagttaatttttgtatttttagtagagatggggttttgccatgttggccaggttggtctcgaactcctaagctcaagtgatccacctgccttggcctcccaaagtgctgggacataagagacaggtggcgtgccttctagtcaaacaggggcctatgctcaaggccaggccagtggcacagttctcctccctggcagtgcagaagtggctgcccaaggacaggacatggagtcgaggttggaggggctgcttgagacgtcatggactgtttaccccacgtgcttcccctgaggagggaaaagtgcgacgtggacagggctcccataacctgggcacatctcacatgcatcacagccctgagggtgccccactagcaccttagtcctgtgcctcctggccttcctgccccctgcctccctctgggctgggcacctgagccgaggggtcctggctgttggtggccctgacttctggcaggaccctgaggagcagcaccagagcctgcagatcctgtcccagaggggccagacctcaggcataggcgggtccgagtaaagactcctcccctttgtgcacatgggcctgggagtgcgtgggcctaggccagggcgggctggcctctggtgtgggctggctgtgaggttcattgagcctccccagctgctctcactagcagggctgcccggcaatgcctctggggcccaggtcatttgctttagctccttgggagctctcagcaaaggagacaccccaggtgggaaggatccggctgagggatgcccaccacaggggtttcctctagtgtctgtgggtcacacagcccagcaccgtcctgaagaggctgtccccagctcgtgtggggtggctggcacccccgactgtcagcctgtcctgtgattaaatgagatcacaacctacagggtgctgccacccttaaggctgataaatgccatttataaactccctggagcaaatgccaaactttccaaggtggggttccaagaaaggttcttgtttttgtagagatggggtcttcctgtgttgcccaggctgggctcgaacccccggcctcaagtgatctccctgccgtggactaccaaagtactgggattacaggtgtgagccaagtgtctgccagagaggttcttaaatgatttgacactggcttttcctcaagcgtttctaaaccttctaaatgacaaccactgggacctgcgcaagacgagtgatcctggctggaaatgaacctctgaacctctccccagatgctcttctgttcatccctctgctgcctcaacttccccaggcacaaggggtctggactcttctccctgtcttccccacctcactcaatagcagctccatccttctggctgctcaaattcagacccctggagtcatcctggactcttcccacaacacccagccctgatgggctgctgagtcctgctggctctgccttcacaacctacccagggcctgcctgctccttccccatccactccaaccccagggctacaggagcctcctcctgggctcgctgctcctgacctggcccctccatctctgctttggacagtagccaaacagctggaccgtggccctcctctgctcggcccctcacctctctggccccacctcccaccttcagtcctctcctctgcccgagtctcctggctgtttctgttccctgacaccccagagctcagtccctcgcccactttgggtctcacttgactgtccgctctgtgcaaggctttcaacatcatcctactcaacactgtcaatcactcccaggactccctctactgccgtccccgcttttatttttccacagtcctggtcactattgaatgcactatgtattttacttctttatttgactgatttcccctctagagcttcacagatgggattccttctgttgtgtctccccagctcctagaagagtgcctggcacctgttgttactcagcacgtgtgtaatccggtgaggggcactggcaggctggaaatgacgaacactcaccagccaggtgacagggcaggtccatgggcagcctgacttcccaggatgggtggtgcatgatgggcacccatcagcctgcttggccgggagcagggagaggatcgggagacccaagctgtactccaggcaaaccctctgaatggtcaaattggagttgtctgaaatggacaaccctacaggtaatgtttagatggttctggccccacctatggcatctggaaacgatgtctgatcctgaagggatgatgagcctggttctactatctccaccaagcccagggagctcagccctggctctccaaggcctcctgagatggcaccttcagaaacacgccctggcatttaacatctttcgggtgaggctggcctttggccctgggaccacctgggaacggttgccacatgcacctcattacaacaccaacacgtgccccttatcagccagcccagtagtgcagacctgattcctcgataaccactgggctatcaggctcactggggttggtgaccacatccccaggaaatacggccgcctgcaagagtgcacagtcccggggaggccgccaccttgctcagacctgcacgtctttgcgcccagccaggctgaatccctggagggctgagtgaggagcccacccagtcctccttccccaccaccagggtaggaggcagccctgttccttcccttcactcaggagcatttatgagcgcctgctgtatgcctgactctgccacagagaaaacagtgttggggctgcagcaatggcccctggcttcctggctgaggccgaccttgacccagaggtggctgggggatctgagccccttcccaggcagtctctttccacttcatcaggcagaaacttcttcctcactagagctggcctgactctggtaacatgtcatttgtcatcataattcataatgcaataggtatttgtcctttttatgggtattttaaaactagaacttctctgcaagacaactgtgcctttccagtgccctgcactgagacagtaactaccgggttggaagaagcaggtctccttctgtggggcagagatcaccatggaaaagtggagcacaggccctggggccaaagatcagggttcaaagttggcctcccccactagcttgtggtgtgatcttggacaggttactgagcctctttgttcctcacctgtaaaaggggcttaataatagtccctgggcctggcacagtggctcatgcctgtaatcccagcactttaggaggccgaggtgggtggattacctgaggtcaggagttcgagaccagcctgaccaacatggtgaaaccccatctctactaaaaatatgaaaaattagccgggcatggtggagggtggggggcacctgtaatcccagctacttgggaggctgaggcagaagaattgcttgaacccgggaggcggaggttgcagtgagctgagattgctccattgcacttcaggctgggtgacagagtgagactctgtctcaaaaaaaaaaaagcctgggcgcggtggctcacgcctataatctcagcactttgggaggctgaggcgggtagatcatgaggtcaggagatcaagaccatcctggctaacacagtgaaaacccatctctactaaaaataaaataaaaaaaaaaaattagccgggcgtggtggcacacacctgtagtcccagctactcgggaggctgaggcaggagaatagcttgaacctgggatgcagaggttgcagtgagccgagattgtgccactgcactccagcctgggcaacagagcgagactccatctcaataaataaataaattaattaaataaataaaaatttaaaaataaataaataaaataatggtccccttactcagagggttgctctgagaattaaaccgatcttacctgtcacttaattatagacacgtgcagggcccacaccagaggctggtatgtggtcaggcctcggggaacgtccaccggggctgtccactggctctccccacagaactgtgctccacgggggctgggcctttcctccaccgctgcctccccagggcccagaacagcatctggcacacagtaggtgcatcataaatgtttgctgacaaaaccaatttcctaacatttttattacccaccaaagaaactcggtacccatctgcagtcactcctccctgctttctcccccacggtcctggaagctcattgccccatctctgtggacttgcctgttcttgacattttgcacaaatggaatcacacagcgtgtggctctctgacttctgtcactgaacaccatgttttcaagatctatcgattctgtcatatgtccctgtgcttcattttaaaaattactgaatactattccctcgtatggctagactgcacaccacactttatttatccgtgtaggagttggtggacatttggattcttttccactttggggagaatgtgagattgtaatttgccactcttgatacatgactgaacaagttaataaaaagatatttaaatagaaaaccaaaaattattattcatttaaatttattcataagattatatgcttatttatgattctatttcctacataattgctgtttataggtatgaacataattgccatgtacacaataccatgtgccatgataaatggcaaatttctttaaggatttaaatttaaaaagaaaacgacataaaaacaagtcaaagataggaaattttttgaaaacccaaataaagaaaagccttttaaactcttattccaaaaaaaaaaaaagtttgctgaacaaatgaatgggctgaaagaggagtgatctgacaggcaggtgcagggtgagggggtgcgcgtaatgggtgtaccatacgcacatgcgcatgcacacaagcacacagtgtgtcctcaggcagggagggtgagaagagtgtgtaatgggtgtacatatcacacacttgcgaacatgcgcgtgcacacacacacacagtatcctcaggcagggtgagaagagtgtgtaatgggtgtacgtaccacatgcacttgcatgcatacaagtgcacgcgcgtgcgcgcgcacacacacacacagtgtgtcctcaggcagggagggtgagaagagtgtgtaatgggtgtatatatcacacgcacttacgttcgtacatgggtgcgcgcacacatacaaagtgtgtcctcaggcgggtagggcgagaagagtgtaatgcatgtacatatcacacgcacatgcacacacacacgctgtatgtcctctggcaggcagggagaggggtgcgtgcaataagcgcatacaccacatacatgcatgcatgctctcaaggctgggacatggaacccagccaggctgggacagaaagcgcagcgccagcaccctggggatctctctccattcaaaatcatggacttcataaaagcataggctgtgggcagagcctcagaggtttaagcaggaaacagcgactgtgaggctgggatggaaaaggcagcgactgatacagccccggctgtgtcccggtaaggggccaggcagcggatgcatgccatgtggggcctgacttagtctagacactggctcaatgccactgggtggtggggactcagggcccctcctcctccccttccaccccctgcatccaatccacaggtgagcgctctcagcttcacctccaaactcaccctccagccccctccctcccatggccaagcctaccagtctgcccccatggtagcctcctcactgtcctccccacagccacctccgtccactcaccccccaaagccaagccccagctgggccaggcactccccagctcccagaaaccacttagtgtctcatggagacctggctgtgtggcccactcctctcttacccgccacaccccatccaccatgtctctctccacgtggcaagtgccggagatcctcacccctctcggcctcagctcaagggtcaccccattttcctggacaacattttatcacagtgtgtaatcctcccacttgtctgtctcctactttgggatgttggctgtgtgtccaggctgaggccagcccagcccttcagaaagctggaggtcaccacagtgaagtgcaacgcaggctccaggaccaacgccaaggttcaaatcctgcctccccctttagcccacagtgtgatgctggatggattactcagcctcctcaatggtcccatacacagagggttgcttcgaggattaaatggatcttgtccctcatttaactacacacatgcagagggcccagaccagaggctgacacatggtcagggctcaggaaatgtccactgggctgcctgctgcctcgctgctgaatcagcatgtatgaacctacagataaggcaccaggcctcgtttctccagagaccaaatgcactattttaatcagctcaacagtgttcccccaaatttatacatcaaagccccaatttacagtgcctcagaatgtgactatttggagacggtgctttaaacaggtgattaggctaaactgaggacattagggcaggcctaatccactctgactgttgtcctgatatgaggacatctgagcatatgagagagaccccagggatgcgtgcacacagaggaaaggccgcatgaggacatggcaagaaggcggcaagcccaggagagaggcctcagagagtagcagccctgccgatgccttgatcttggacttccagccaccagaagggtgagaaaacacatttctgttgcttaggccaccaaggctgtggtcttttgtggggcagccctagcacactcacacaggcaccttcaggccagagggtggaagaaaggaccccagatccaccagtgagtgtgtgaaccaccagggcctgcactgcccatgacctgagctctgaactcgagtcccaccaggctcaaagccaggacctcagaggacatcagacaggtgtgatgagtcccttcccccaagccagctctggccacagcctgctgcccaccaggagcggcctgaattattccccgtggcagaagagagaaatccacgacctctagcctgcctgcccctgcccccaccaccaaggaagggccgcctgtccaaaccacctggaccccgcagcctgttcgggattcatttctttcctcttcaaagcattacagattgattgccaagtcttgccgtaaatcaaaagacagtcactactcattacctacttagaattccccgagttcttcctgggaagccatttctcatctgtttgatctcggagccaccagcactatctccaggcacgccacccatcacggcagccgccagacacttttttcttctgggctcctttctcagcacctagatgaatttctacctttctccagctttaagaagagctgccaagataaatgattcaaagactccagctcatgctgaaaatatatggactgcttaaagcctattatgaatcagccaacactggggagagacgcactggctgcatcctcaccggacgggtcatcctggctgctaagacctagacccacccgggcacgtggacactctctggagtcttttcacccgtgggatcatgacacttgcccagcttcaaccagcaccaggtgcccatgccatccccaagcctctgcgacctctcagcacagggtggccgagagccccacagtcacatgctggcctagcagaagtgaggggtcccctgtttgcacagtgcatccaggaggaacttcggtccccagccttgaagctgggaccccttttgcaaaagcagcatgctctcagccacggctgctcaccacccagaggggagggcccagcgggcatcaggaccccgcaccgagggtggtgaggcctttctgccacctctgctgatagggtcccaggaccacggctttccgatgtgcctcccactgtccagtctatgcgccagtctccacagccatcagcaggccccacgaagggcatctagcccctcttatcttgctgggatggacagtaagaaagtaaaacagcaccagcaaagcccagccaggctccgactcaaccagccacccagacattggctgtgtgggggactagaccgccagggccctccagcaatgaactgcggtcaccttgggctggagaagtagctatggtgcacttcgccctagctgggatgcccaggagggccacctgtgccaccgtgctgcttctgaaggttgtgacatgggaagagttctatccccaggtgcagacatggaggtcagcaatcaccactcaccaatgaggggaccccaagtgctgtcacaggtgcatccacaaggcttgtggcacactcatggagggtggccccaggggaacactgctgcaccagtgccggatgactgtgggtgaggagggacacagactcatggaccctggggctctgcctccacaaaacgggcttttctaacaagagggtggaattcacatgaaggaagctggctggttctgtgggcagcagtgacaatgaccccagatccatttcccgctgtccccctgccaagttcctgcaggtgcaggagcccgggatgcatggcagtgacaatagcatttgtgcaggcagggcaggggcgtgctagcccaggccaagtctgaggcctgtcactgacatgggatggagcctgtgcccaccagcagcctggctcctgggcatctaggcctgttcaaaacctgtaacacggaagccaacagaaatccacagccagagggagctgcgagaggacggtggctgagtgggtggggccaggccagtttccctcctgctcagccacccccaagatgcttcctcaccctactctggggcagctgaagaaggcagctgtggccaggcccatggctccctcctggacagctgccagaggaagcacgaagacccacactgcccatcctccatgccacagacagagtccaaaccctcagcctgaaccacaaaggcagaggatggccttgtgcgggaggttcctgaggacgcaaactcagcttcacagccccggaacacagagcctgctgtcggagtatctaacagggatggggaggagcctcaactttggttttatcataaattacctccaggcttcaagagcagacatgcctgccggcaggtatggagacagcccttcctggatgaaaccattcatgtcatccacagaactcagagctaggaggagaaaaactcacggcccggaataattactcccgcagggagcgtctttcgcaccagcaggtgataggtctggatgaggattttctaaaaaccggcaccaaacctcacagcataatcactactgcctgcctgttctgggagccaaacctcaataactgctcctgcggggctgctcctcactagatgcgcccaggacttggagccacgccttctcacgggcagaaccagacaggacacagccacctccgaggtgggcgtctggtccacctgcccagctaaacaccctcccatctaccacgggctccttccggcatggaagaacaggaaaggctcctttagagtgggggaccagctccagaggcctggaggcacccacaggagtgaagctggccaggtagtggcatgcaaaacagaaaaaaaagtctttttttttccccagagctctcctatttttcttgaaatacatgaccctttcgactatcttttttttctcttttgatagagatgctggtatgagaaggctttctcatttatgaaagaaccaacagcatgaaagccatgaaaagagtcggcttcagtgctcggggaggtgacggggagcggtggggcctgtggcgtgcaccctgaacgaaagctatgtagcaagcaccacgctgctgctctgtggaaattccagcccacggttaccagctactctgattttcaggaaaagccaaaaaaatctgatttttcaaatttggttgacttcaatgaaccaaaataaagtgttaaaatacctattgcctgggccaaacggaaactgcgtgtgtactggatgtggcccagaggccaccagtatataaactctggcctttctcttgctagaaaattcttcctggagaatgagaggtggggacccagggtttccccacactccccaaccaagaccctgacgggacagaggcccccagaggctgcagtccactctcacaggggcctcgggggaaggcaggcagcaaatgggggtgtggccaaagccaactccaggtagctggcccactgtagagaagacatcttccatgtccaccgaggtgactcggtactgtctggaccacctggtgcaactcatagccccctcctcagctcctctggggtcgcccatcttgcacagtgaacctacaagcaacctaaaccgttcctccccctttcttctgggcctgagcaatttcagcagagccccgcatggtggggtcaatcagacagctcttggccagctgtgcagaaagagccagagaggtctcctgggtgaaaaatgagaggaaacctaaaaagatccaccagcccatgttttctcaggatccatgaggagagctcaccggagaagcctgcgccaaaacaggaagggaccaagccacaaaatgcacacaagaaaacagcagcagaacgagtgtgcagggtcacagcaggagaatgggagacaggcttgagtttctcactggtgcgcaagtggacatcatgagaggaagctaacagccccggatcacatccaggagacctagtacgtgaggaggaggaatttcaaagatgaccctgagatgcagaaagctttcactgctcagatgaaagaagtcggtcatagactatcgcaggtgctcacagggaccaccccaggcggtgtcccaatgtgcatggctccgatcccagcgggtgccacgttaccttctgaaactgataaggaagccacagagaaaccagggaatgaaatctgtccggggtgacatgatcaataattatatcacaggtctcaggtagcaggacccaaggggatgaatgcttgcctctgggagtgaccagggaggtaacagacaggaagcagagcatgtgatgcccccgcttgggtgcaggagtggccactgccactggcctgtccactgtgtgcagaccagccttgctggtggccaagctgcctctgtctccgcagatctgtcacatgcaccacctggtctctgtgttaggtgtgactgcttcttcttgactttttatcagtctaggtcagaacacacccgatgtgaactttatggcctgagttgctcgtccctccagaccccccgtgctgcctactggctgaagaacttggaggctaagcaagccccggcttgtgccccttcccaaggagcctgccttctcctggtcctcccagacagctggcaggattctaagccctgaagtgcagcccctgcccagaaaggcagtgagacagatcctcaggaaatactgttacttccaagaatcaatagtcctataagcatccagggcaagaaaatgaaaagttccctggaaagaaggaggaatatgatttgctaaagatctctggcaacaaaggagggaatggttttatggaacaaagagtcaatacccactgaagccaccattcacgcaggagacaacaaaagaaccctccaacaagcaaggcactgaaagtactgaatcaaaacttaaagcactcacacgagcaaagggaaaacatggtacaaaattgaggtccacattggattgagtgagacagtgctcactaaataaccgttggtaaaatgatggtaagacaatgcaaatgttgaaaataaaggaaaaagaagttatataataaaaaactagaaggtaggggaaagggagattataaagtaaaactgaggcaggaggcgggacttgactctggaggcggggctcggacaccagaccaaatggagaactagccaaaacaggtcccaggtaaaagcagctttccatcagacacgcccaccagtgcgccatgtcagtttaccattgtcatggcaacaccagggagttaccacccctttccatagcaatgacttgatgaaccaaaagttactaacccctccctaaaaatgtctgcataaactgccccttactctgcatgtaattaaaagtgggtataaatatgactgcaaaaccgccctgagctgcggctctcagcacactgcctgtaggtagccctgctctgcaggggtagtcacggagctgtcacaatgcctgaactgtaacaccgctgctttaataaagctgtttcttcctaccctactactggctcacccttgaattctttcctgggtgaagccaagaaccctcgtgggataagccccactttagggcttgcctgccttgcatcaaaactatgctaagtttctaattttttaaggaaaattttctagttttttaaggaaaattagaaacttaaaattgttaaattgttaaaattagaaaattaaaattgtttaacttttgaacataagtagaaaacagaaatacaggtctttttttcttgatttaaaggtgattctacatttaacatggcatacatataaaagtgagcaaaggaaatttcaccaaccttccaaagatagaaaaacttttttaaagccacaaaggaaaaaacagaaaccagaaaacacaaaataaggctgtagaaaagagaacagatgctgattatcactgtgaattcaaacagctctcctaacacggggaggctctccatttgaacaatgagtatgctgcaccttataaacaacctattttaaaaagttaaaaatacagggataagcaaagatatgccaggaaaatgtaacaacaacaacaaacatagcaacaccagtgtcaggcaaagtcagattcaagacatagattaaataggttaaaaggggtttcttgaaagctataaaaagcaaaatatataataaagacataacaatcatcaacttttatgcctcaaacaatttatcatggaaatgagtaagacaaaatctatcatgaatcacaaagaattataaaaccatctctctaaatcttagagcaaatatacaaaaataggggagggggcagaggactggaattagataataaacctgattcatgtacaccaaagtatatattctaaagataaaaactaaacactttccagtattccataaaatactgaccaaaatatttttaaataagccacgaagaaaaacttcaaaattaaaaaccaaaaagattcacaccagctgcattctctagctccaatggtgacagaactagcagctaaaaaccaaaaggtcaccaagaaaaattcaaccacatctactgggaaatgaaaagaaatacactaggttagttcttaggttcaaaaacaaatcactctagacataccaggatatagctaaggcagtattcaaaaataaactagccaaaatctatttattactaaagaggaaaaaataaaaaataaactaagattcaactaaacaagttaaaagacagatgcgtcaaaacaaggttcaggaagagaggagaaaggaattaataataaaactggaaatcaatgagtttgaccaacagtagaactgaaaaataaatttaagagctgattttatgaaaaggccaataaagaagataaaactctagcaattataatccatagagaaaaaacacaagttacattaggaatgagaaagaaaaaacagctacagatataaaggagatattttaaaaacataagattttaaaaatatatgagaataaaattggttacttggttacaatgtaaaatctttgatgaaaactaagactttataggaaaacatacttactgactctaaaagtgatgaatttggactaaaacaatcccataggaaaatctgaaaagttaccaaagaaatcttccccagagaaacaacagggtctgagagattcaaaggacttcatgccttcaagaaacagccaagccctatgctttccaagttgtttcagaaaacagaaaaacatgggggtgcttcccaaaacatgatctcaaaaaccttggtctcaaaatatggctaagagagttaaaggaaaaaaatatatagctcaatttcctattttgagcctgtataaaatgctagtgaaaaaataacaacaatggccaggcatggtggctcacgcctataatcccggcacttcgggaggccgtggcaggaggatcgcttgagtccaggagttggagaggcaatataatgagatcccaagtccacagaaaaataaaaaattagccaggcatggtggcacgtgcttctagtcccagctactccagaggctgaggggggaaggtcacttaagactgggaggttgaggttgcagtgaactgtgattgcaccactgccttccagcctgggcagtagagcaaaacactgtcataaaaaaataaataaataaataaataaataaaaaagcaacaacaagcaccataaggatgcttagtggatgtccatctgctccatgtgttatgcatacaggcatgcctcatcttaccgtgccttgctttctttttttagaaattgaaggtttgtggcaaccctgcgtttagcaagcctactggtgccatttttccaacagcatgtgttcactttgtgtgtgtcagcattttttagcaataaagtctttttaaattatggcatgtacattgattttttgagacataatgttattgcactcttaagagactacagtatactgcaaacataacttttatatgcactaggaaacacgaaaatttccaatatttgctttattgcagtagtctggagctgaagccgcaatatctctgaggtatacctgtatatcaattcattggatcctcctaatcctcctatgaagtgctattatttttttccagatgaggacactgaggtagtgttatcaatgtgcccaagctggtaatcagcagagctgggacccaaaccaagaacactagtctctggggaccatgctctacccactctactatactgcctcctaagtcggcttcttaaagtcctgataaaccacaataaagtagtgtgtactgggatgcctcactggctctgcaccaggacgtctggtcataaaattcatctaaggtgcacccagcacccaatcttggtttctaataccatcctccaataaaaggaaccgggctccttagtgaaatggctaactctgaggttggagcagggaacagacaagatgagcccggtgcaacccgcaatgccagaaaggaagggaatgctccaaaactaaaatgacggggtgcatcagaaagacacaggagtcaaacgaaagagccctcgatgcccaaagctggaaggatttgagcatcacagaatactggattataaagtataaaataaatatccatgggtctatacaagttttttaaaaaagaggccaggcgcagtggctcacacctgtaatcccagcactttgggaggctgaggtgggaggatcacttgagggcaagagtttgagaccagcctggccaacatggcaaaaccctgtctctactaaaaatacaaaaattagctgggcatggtggtgggcacctgtaaccccagctactcgagcggctgaagcaggagaatcatttgagcccaggacgtggaggtcgcagtgagccgagattgtaccactgcactccagcctcggtgatggagcgagactctgtctccaaaaaagaaaaaaaaaagaaagaaagtacaatttcaagtttaaaaaaaaaaggttgaacaaataaataaatgagggagaagagacaaatgtgtacagaaggatcacaaatagcataattcccatgccttaagtgtgggtggcacacagtgactgctttccaagagtacagaagagtgggtaggggagtgactttacagtggagaaacctgacaagcactaccttagccaggtgatcaaggtcaacatcatcagtgataagtcatgctgatgtgatgtgatgacaatggcacttctgtgctctccttcccagtaactcataactcctgtctcgctgaaagaaaaactaaaattgaaaggcattcttcaaagtacctagccatactcctcgaaagtgtcaaggtcatcaaaaccaaggcaattctaagaaactgtcacagcccagaggaggctaaggagatgtgacaatggaacgtgatatggtctcccagatgggatcctggaacaggaggagggcattaggtaaaagctaaggccgctggaataaagcatggacttaagataataattaagtatcaataacgtgcatccatggtaacaaatgttctaaagtaatgttaataactttactaatacataatagggaaaatgggtgccaggtacatggaactctctaatgttcctgtgacttttccgtaatccaaaactatcctaaaataaaaagtttactgattaaacacacacgtggaaaaggccaagggagatgctgaaaaggcagctgataaaattcgacatcctttcctgataaaatctagtaagccaggaagacaatgctacttccttaaactcgtgataaatatttatctgaaatcaacagtcagcatcaggtttttggcttttttttctctttttttttttaagagatggagtctcactctgtcgcccagatgggagtgcagtggtgtgatcatagctaactgccgccttggcttcctgggctcaagcaatcctcctgcctcagccttccaagtagctgggactataggggtgcgtcaccacactcagctaattaaaaacattttttttttttttttgtagaggcagaggtctcctatgttgcccaggctggtcttgaactcctggcctcaagcaatcctcctgccttggactcccaaagtgctgggactacaggcatgagtgtgtaattaccatgcctggcaatatcaggtttaatggtgaaacactagaggaaaatccataaagatgtccacagggagcacagttccttatgatttctaatatgattctccaggagcaatgcgcccagcatttgaaaagacaatgcctatttatgttagttttgccccaaaatctctagtccttcatcgaccaggttacacatttgcagaaagctcttctctctggttctctgtccagctttctggctggacaccaagttggttttctccacatgcccattcctcagttactcctagaggcaaaatgagccatccctgctttaagccacagggtcccacagcctgaccccgctgagagccccagtttcattctcggatccctggctctgtcgaatctctggtggagagactctccacactcgcctgtccccaactccctccctcatgccaagtggtgtagacacagcaggatggacgggcacacaggacctgccctgccagcacagggtaggctctggactaaggaattctccacccaagacagccctggctcttgggaagggctcagcttaaatccccctaggcatggccagccagggtgcaggactcaaggactgccctcctagggcttggacacgcagatggtgtttcctgactgctctcatgataggctggggcccgtctccaacagccaagcaagtgctagcagcaaacctactccaagccacctgaggcaaagagggtgtttctccagcccagacctgtgtctgaaggggccctcttctctgaatgggctgtgccagtgccctcacccatcaacacagccttcagagaaaggatgtgtctgctcagcgggtgcagggtcctgcccacggacacacagctggtccccagggcccatcacatccattcttacctgggggctccggtctcagaggccgcctggacccagacttgttccaaacagtcctcaaaactgcagcaccctttgtgggggtggctaaatggatggcagtctcactgatgcccacatttgtccaggctgagagcagattaggtcagactgtgcctggatgatggagactgcatctccaggacctcccggaggaagacggggacctcctagtgacttccctctccagtgaaacctgcgtcctctgcatgccctgtgaggggccccagccctggtcagagacacacaaggtgtctcaccatccacccagagtgcccggcaacacagcctcgtgtagccccacacgggaggaggaccatgtgggcacaggcatccgagatacagttcttcaggagtcgctgcacaggagggactcggatgaaaagcagagggtgccaggccgggcatagtggcttatgcctagaatcccagcactgtgggagaccaaggcagcaggaatgctagagctctggagttctagaccagcctgggcaacaaggcaaaactctatctctacgaaaaataaaaaattagctgggcaaggtagtgagcacctgtggtgccagttatttggggggctgaggcgggaggatcacttgagcccgggaggcagagattgcagcaagcagagatcgccccagaggggcgtcctctctgcggccccacgccccctgcagtcctgagcactgtgggctggcagggatgaggggggctgcccacagactctcccacctcctggctgtccttactggagtcaaagtttctagtcttttttatttacttattttgagatggagtctcgctctgttgcccaggctggaatgcagaggctcactgcaacctccacctcccaggttcaagtgattctcctgcctcagcctcccaagtagctgggactacaggcgcccgacacctagcccagctaattttttgtatttttagtagagacgcggtttcaccgcgttagccaggatggtctcgatctcctgactttgtgatctgcctgtctcggcctcccaaagtgctggaattacaggcatgagccaccacacccaacacccaaccagtttctagtcttaaaacaagaaaacaaacaaacaagcaaacaaaaagagaaaaaaatctgtcctgtttaacaagaatgcagcaaggattttgcaacctgctcccaggctggattcacggagagctccaaccccgcccccagcaccctcggctcgggtggctctgtatgggttggggggcgggtatgtatgtggtatgtcaatgggtgtggtacataccgtgtatgtgaggcatgtggtgggtggcgtgtgtatggtgtgtagtgtgtgtatggggatggtgggtacatgttgtgtgtggtgtgtagcatatgtggtatgtatggtgtggtgtgtgcatatggctgtggtgcatgtgtgtggtgtgaatgtgtatggctgtggtgtgtgcagggtattggtgtatgtggtgtgtggctgtatgtggcatgcgatgtgtggtgtgtaggtgaatgtggcatcagatgtgtggtgagtgtggtgtgtaggtgcatgtggcatgcgatgtgtggtgtgtgtggtgtgtaggtgcatgtggcatgagacgtgtggtatgtaggtgtgtgtggcaagtgatgtatggtgtgtgtggtgtgtatggcgtgtcatatgtatgcagtatgtggtatatgtgtggtgtgtgtatggtatgtggtatgtgggggttgtgtgtggaggtgtgtatgtgtggcgtacatggcgcatgatgtgtatgtgtggtgtgtgtgtggtgtggggtgtgtgtgtggtatgtggaacgagtgtggtgtgtgtgtggtgagtatggtgtgggcggtgtgtatgtgtgatgtgtgtggcgtgtgtgttgtgtgtggtatgtggcatgtgtggtgtgtatggtggaggtctgtggtgtgtggtgtgtggtatgtggcatgtgtatgtgctatgcagcatgtgtgttgtgtgaggtgtacgtagtgtgtatggtatgtgtgggggtgtgtgaggtgtgtgtggtatagggcatgtgtgtggtgtatgtggagtgcgcaggatgtgtggtatgtggtgtgtatggtgtggcgtgtgtgtcatgtgtgtggcatctggggcatgtgtctggttgggggagaccctcaggtcgtgtcccctctccccagcccatctgtactcgaggggcgctgggcacacagaatcacaacttgctccatgtggccaaagagtaagaaaagcaccaaggccttgaatgagaaggagcacagctgggcaagcccctcactcacaagggactgacggggacaggagctgcgattgagggctgtcgcctgtggcaggagcgcccagaaaagcccaggcctgtggagaagggtctccagtgggtcttggcctggaaggggacgccaccacacggtacccgtcacactacacagatcctctccctttcccatgattctcatgaccccccagaaacaaaagggccccaaatgccccattcacagctcagagagaaagagcataatttcaatcaaggtctcaggctgtcatacacatcgcgttattaatctccttgtggcaaatgtgagctgggactcgcttacacagccaatggagcatgctctaaattagcgtttgcaggtaatggatccggccgccagccccacgccagctggctacaagctgggtacgccactaacatgaaataataggaggcggaaaaacggatggcctgattgggcctgctgttagagcccaatttacccaacacggacgtcttattggtttaacacaatttactacacctcaattgcggaaaatgattttcattcctctgaaccctcaactcccaggcgccgcatgagggaggagtcttcataaatgccatccgctcgctcactttttttttttaacatgccttcaagattttataacaaatcatagataataaaacaaaaacagatgaggcttagaactggaggtccaggccaccatcgcttgagtcctggggtgggtggtgtgtccaccttcgagaaaaccagccctgactcctgccccgagtcctgaactgcagagctccctgccttcatgcccagtgtccctgtgcaaggctgaagccagccaggcccccagcagaaagtccagcaggtcttaaggatgcccaccttgctcacagggtgctgtcaacacatatagaagagcggctggtttcctttgaacccagtgagtcagcgattcacacagcagtgcagctgccccccagccttccctggtagcagttgagcctgtgttcaaagaggcacacccccgggtaaccaaaaacacgggctttagaagagatttttattccccgactagttaagaaaagaattctcaagttcccagtgacacagaagatggcagaaaaatcacttaaaaccttttcttctcttttccacccacatacatttcccgacacctacagtgggtcagacaccgcgcagataaatgagacatggtccccaagaaggcgcctccaggctctccaggacaaggaccacaaaactgcatcacatagtgatcctgccctggagagggagctcgaggcggaagaagtgtcagcccacctccctggctgcagatgtccccaggggcttcaacctggacactggcaatcggggcgcctcctcaaatctggccagggatactccatgatgtgacactttccccagacacccatcttcccaccatcttcagagggggtgacccctctctcccaactcggtcccctcaggaacagcctccatctcttgttcttcctgtctcagtccccgtacccacccccctgctctaagctctcaggggcccacagatcagatagcttccctggtgggcacggtttcccctccctatgtcctgtggcctgcagcaggtgggtgcacatggcaggtgcacagcatgggcagcaggtacacacgctgacccgatgccactcagcaccctgtgggaggctgctcctggctgagagcttcccggtgcactcggctgtggcctctggcttcgagctcatctctccaagagccactctggtccacgcaggaggcggcagcaaggccaacccagggtcttgggatgggggtggagggaaggtggagcagtttgtagacaggggtgacatctccccagagctcaggttcacgacaccctgcttccaacagcagccaagtacaacatgtggactctgtgtggatcctgacttgaacaaaccaatgctaaaaagagtttaggatcaatatggactagatattcatgacatgaaggagttacggttcgtttgtgataatgaatgtgatattggcatggtggttatgtaaaagtagaaaaaagttctcaccaactggaatacctactgaggtatttacaggtgctatgacacgatgtctaggatttggctttaaaatgctctagcaaacaaaactaaacacaaaaacctggtggggactttggggttcattatacttttctattattttggatactgaaatttcctgtttaaaaaaaaaaaaagacctccattacctggaaggcatgagggctaaggaacggcgggtattccaggtcccctggcccctgacccatagcccatgcagccctgtccccaggttgggcagggtcgggctctgggacgctgtggggagggaggctcagggcccctcccagtagccaccttgggagcaggactgcctgcagcacggggctcaagcagccagcatgcagaggacggcagggttccacactgggctcagctattcctgccccaatttctcagttatttttatttgaagcatcagctatgggtcactgtgattcaactcaagctgggacaggtttccggggcagtgccaatctgagggacccactgtccagcccacctcgctggaggagccccacaacacacttcccatcccagatcctcggagcgggcagggggtcctgggaatgctgggccacagacaccgcactgcagaaggagaccacgcagacgcaagtgctgggatagctctgcgagcccttctcagcctccccggctgacggagctgggcttctgattaacgtgtgttacacggcccctcccaggatgccaagcacctgggtcaggccattttaacctcctcctgggcggggtaaggagagaagcacaggcactgactgctcagaactccttccagggcaagaccttaaaaagacactcgtcccctaagcacagccacagcgaactgaagcatccaagcagcccactacgggccccatccgacctcggccctgcaccccactgatggcaggcaggccagcctgggagggtgatatggagccagcacccccagggccggggctctgaacagagcaggccctgaggacatctggggtggacttgggccctgcaaggggggtaagggataccagaaaccaagctctcacaaggacaggcaggaaaggaaagcccagagtgaggacatggggatggcagcctcttcagtgtcacctccccagagcttccaggtggtaccaacactggtgggaggtctcggaatgggggcctcctgccccaggacacgggtgggaagggagccactgaggcagtttgggtctgacccaaaggtttccttgtaccatgggtggcagcacactgacttctgggtcctggagcggggctgagctggccaggccacacccgccacggctgggcagccgccggaagctccccgggtgccactggctcgctgcagccctaataggagcagaaggccaatggagctctccagagctctttatgggccatttaaccatccctcaacccagtcgcccgagcacagcagacataatggcagtgtttacacataaaaacggcaagctgttttactggcggctttcagagtcataagagcagcaatttggtaaagtttcctgcaaatggcagaaacaaagtccgagagtagaatggtggggcactaaaccaccctgaaaagtcatcgaaaaccattacatcaaacactctgccaagagccagggaggcgggcgcagtcagaagaaaaataatctttgcttgtgatcctgaagccctgttcataatctccgctcacggtgtgtgtgccactgcggcgtctcatctgttactcactcagggaacataaattactgttttttaccttttaattttacccggagaaacatggtggcttacctttccaactcatattctttcattcccacttttacagccttcattacctggaggacggatattaagcaaagacatttgtattaagcagatcagtaacacagcgtgataaataacatacagcacttcttcaaaagcacctcttctttaaaaaggaaaaaaagaatgatatgtgcatgcagtggtacagacatgtgacaaattagaactttttaaaagctccaaaatccatacagtttatttaaactgctatgaagcacttccatttggaagccgataaatgccatgcctcaagttacagctcagaggccaccagcagcccgaggacagtgaggatttaaccacgaggtgcttggtgaatacttaatgccacgaaagctatgacgatcactaaaaggcctcctttgtttaactttcataaaacacggagagcattatctcgtacaacagagtacgctgcccatcaattacccttgtctgtttcctaacacaaaactgcaatgttcctgagcagacggtgggccatcctcatctttcaagacatgtgtttccttatttggtctcattcctccagtaaagcgggaaggtttggaagagaaattttcagaaaatggatgatggtaatcagtgtgtttgaaccacagttaaggacaaaagattctttaaaatgagctgagaactgctgggatatgaagaaggagcactctaccctcccagaattgggactttttgttggataatttcctgaggattagtgtccacgactgcatgatgggcaggtgccctaagctgaggaattggggcagagccccttctgtccctgccctgtgcccaccagggaacagaaaagagaacaatcactgtgtaaaacttcctacctctcacttggccctcagggattagagcccacctggaaacccttcatcctcacgcagttctctcgccacacagcaacactgctttccccactcaaccagagccggtgcctgacttacctcacggtgggcctcgctggagattttattggtatagcgcagaacctccagctccatatccgtcttaaacactcggcttcagagacagaagaacaaagcagcaaatcagtgactttcaggaggcactggctggacccctccagggagagctcagggcctaccacaccctgcacagcccagaaggcgtgttgtgcaaggccagagtggggccaccaaggcccaggagtgacaagctccatggaacagtctagaagaaaacctctagcagggagcagagctgctgcccaccttccctaacaccagccagcgggcagactgtttccagggataagatctggaagccgctgcggtgggagaagaagcctggttgctgcagcttgtcacaggctgcctccctcaacctcagtttccccatgcatggaagggggatgaaatctacatggcatggctactgggccataatcctaagcctgctgcctcccagggctctgtcctgttggctgaagaggcctcgtttcctccccacccccacccacctgcccacgggtgggtgacagggtcaggtgaagggacagaagccattccagtttcgtgtgtgctggtacaaatgtggaaacagctggacagcagacacagcaggagaccaggagcagagaagagggaggcagccacagatgagagggtggtctacgtgggcaggggagtcacaatcgagggaccctgctgtcccttcctggctgggctgtgcctcctgcaactggactcctgaggcttccaggtcctcccaacaaacttgtgttaatttgcccaaatgtggttaggtttctggtggttgcaatcaatctcacccgcgagtaagacccacagagaggagccaaataagtattcgttttctacctccacccatttaaaaaaaccctgggtccgcgggcacagaaagggcagccatgctgaggcattcagagcaccggcctgggagaaaggccctgggctccagttcagctccaccccttcccagcggtgtggccaagatccctactctgtgcctcggtttccccatctgaaaaacggagatatgaacactgttttcatcataggtttgcagtgagaacggagttggcatttttaaagcactaaggacagtgcctggcacacagtaagtgctgtgtacacttgttccagaaaccaagcgaaatgcaaagcctgcagacaccacgtcatccatacttcccaccccaaagccaggtggaatgctctgatgtccttaggtaggacatcttgattctcatcaaaacattactccccagtattcatgacaggcccacaaagctagagaaatctcagcaggcaaacgcagcttcccttcactttaaattgccatttactggggacccgccgcatggtgggtcctgtaagttgcagtggatgctgggtgcactgcccaactcatcccctgaggccacacccctctactggtctccttgattcgatggagggagccaagactcagctccctcgcttcagctggggacatctctgggggccactccagcaccaaaactccccatgggagcagctgagatgcccttgtgacagcatcgcagcccaagcctgctcccttactctgacacacacgctgatcctgagagcactcctcaatacgcttcctgcctacttggctcacagactcagcttcccatggaacccaacctagaacaggtactaccttcccattttacagatagcgacactgagacttaactgagacaatgtcaaagagcgcatgacccactctgttacactcaccccctttttgttgcactccatgcaaaaattatagaaccctacacccagacaaactactaaccaaatacagaaggaaactagtcctttttagacattcaaaaactcagaaattggggaagtacttaaggatgtactccagcagagagagaagggtagaagggtggggagagggagaaagcacaagccaataaagagaaggaggtgatataatgggatatttttaaaaactggagtcaatccaaaagtataattagacactggacagcaagcctagaaagcaatcagtagaaattagaactccaagtatgtggctctgagaaaaacatccacaaaaagaatggcatggattcctttctgcagataaaatcaataggaagcttaaagctcttagtgatatggtgaagaagatatgtttcttctctcaataagaaagacgaaaggcaaattaaaactctaggaacaacaaaacaaaacagatatatgtatgaaggctgcatttattcacatggtaccaaagtaacaccaggtagattactctccaggtcaagggggaaaatgtaacccagtgatcagtcttagcatcactgattgtgggtcaactaagtataatttgtgtctgaatgcagtgcaataagaaatacacatcacctgggatgtattctggcaaatgttttaaacttctatggctttagatctaacttccagtttgcaggaaatatggggatagaagaacaagctaaccaccaacacaagcgaacaaccatacaaatccagaattgggatgctgtggtacaactggtccagcctttcagtatctggggggaaaaccatcacaatacccaggtaagagatagaactatattggccacgtccaggatgtcttatggacaactggaggaattcctgtttatgtgaactttctaactttcagcaatgcatgtatatatgttgcttttgtactaatgaaaaaaaaaaaagaaataaaaatttttttctaataaaaaaaccattctttaaacagagaataaactaaaatatggagtgattttgtatagctggtggttatataagaaaaacagtctaggccgggcgcggtggctcaagcctgtaatcccagcactttgggaggccgaggcgggcagatcacgaggtcaggagatcaagactatcctggctaacacggtgaaaccccatctctactaaaaatacaaaaaattagctgggcatggtggcgggcgcctgtagtcccagctactcgggaggctgaggcaggagaatggtgtgaacccaggaggcggagcttgcagtgagccgagatcacgccactgcactccagcctgggtgacagagcaagactccgtctcaaaaaaaaaaaaaaagaaagaaagaaagaaaaagaaaaacagtttatgtgctcttgatgctaggagcctcctcttgagggaggccctgggcttgtgacatccgacccaaagagaaggcactcccgccctgatacattccttagttctgcatagaccacggtcacagtcatcatagaaacacagttttatggcttttttttttaaccttttagagttaatgtctcccccaaacaggtaagatttactgctcacataaatgcaatggaaatattacaaaccctaacaaggaaacagcaacagaagtcgggaggtaaagacgggttggagaaaagatgtgtagagagagcagggccccatctgtgcagcctcagctcacccagggcaaaggcaagatggggtggaaagttcacggagcaagaactaaaggaggctcaaatgtaggacaagaaggcaaatggaacccatggaagaaccagcaataaacatatgatgaaaagatgggtggaggtgacagaaatggcccaaagaattcgctttggggaggggtggtgtggagagagatgagctggcaggagtcgctggtttcatgataacctagctttcccgtactgattttgtactagtggctttttaaaccaagggtacatattgctttgatagcactttaaaaaccttaatgaggtgctgtccataatggtaaatgtccattcattcatttcacatcactaataagtaagtgttagctggatgtaccaggcaccggtgatggagtggagtgaaagggccacgtcctcccctaatggagcgcagagaccatggagagacggatacagcgcgagtaaacacacaatgatggagtggaaggagggctgctaagagcaggagccggggtgctatgtgagggaatgatggagaggcacgagccctttcggtttggggctggccacccggtgagggaggtctgtaatactgagagacctggagaatggaggtgggcaacccagctgagtccctctgcacaaggcagagagttcccggtgcaccccctggccagctccttttcctttactaaagatgacttacctgcaccaaagctcccaaaggcccacccgtgactctcacaaaggtatcaatgcaaacactctcaagatcagcaaagctggagtgtctgaggatgcagaccagcacccacccctctgttgggagcaaagctggggtgtctgaggacgcagaccagcactcgctcctctgtcaaagggcacctctcctgcatctcctcttcctcctcctcggcctggccaagagcccacctgagctggcctccatcgaggcagcccagacagaggccccgaggcaggcgaggatggcgggaatgcgaggggcctggtggctcccccactcccatcagaggcagcaagcccttgggaacttcaagggagcagcccatgccagccagccgctgactcacacggtctccgtgacgctgcacagctgggacagccagccatttgtcactgggaaacgaggcgggcaccctgcagcgcagcgacaccttcccgagaccacagaaccttctggggaatgtggaaaaaacaaacccacaagcccagggagactttctcgaatgaacgccctttctctcggcggaggcagccctaaagcctgacagcatgctgttaatcatcatgaaggtgtctctgatgccgccgtatggcgggtgcagtcccattatctgggaccaggcacttgctcctgtccccagagggtgacagttcagagccatgggcaggacaggggccagcagctcaggctcccgaggtccgaacccacttgtggtccctcaggtgtcattcccactgccaccctctatgacgccagcccggggaacccgctgtcagggagcaggtctctcttctctcaaatgcagtgatgatcactgggtgacagcatgggtgagggccaggatctcccgccctccaaccccttactttctcctggagccgccctctgccttcattcggcttagatccctggcccttctctatggccactactgttgccagtgctgtagactcctcagccctgtgcccacccatccccacaggctcggcctgtgcctgctccaggagcactgagcactgccaggggaagtcatgcactggcaatggccaagcaagccccagtcacctcagcgaggccccagctctgccgtgagctgcaggggaacccgcaggagggctattctcaacttcccgcaccttccgaagatatctacccccaacttctgccccccacgggagccgccacagatgaatgaattccactcctacttcttggagcgcgcagcagccagcagatgggtccactctcacctctcctcctccaaactcccaggactccccatctgtcctctcctccctcccttttaagggaaggtgcatcctcttcccaagctcacacgcccacctggggatcccagctccaacctccaccagctcctgctagaagctccatggccaccgaaacagcttcctctacaagtgaagaatcctcccctcacttgcctccttctcctcttccagtcaagcctcccctacgctgcctgccaggccctaaccgtccttgccttgggggaggagggaaagcagcttttgcgttctattttgaacttcctccccatctcctcccctctcctctcccctctttgcttctctcttcacccccatcatgctgccagccctcccctccccttctcgcagaaggcgtggttccctctgcctctccctgctttccctctgcacccacctgtgggtcctgggtgccctggagctcagtgtgcgagaacccccaccgtgcccccatctcaatgaggctctgccatcttcctgctgcttcagcagagacccgggcgtcatcctagacgccctctcccatcacatccatccgctgcttcccacatccaattcacggccaagggctgccactccccctccacgacctccctcaggcccccccatttctctctatccagccccagcctctctggcctggacaagccctccagcctctaggcctccagcccacctgccctgatagcagctggggatctttaggaaatgcaaaccttatcaggcttcccctcgtttccagtggcctttaggtttccagtggcctcaggatgaaggtaaacctctagtagagcacaactcacgtaggtgcaggccatctccaccactcaccccatgtgctctcccagcctcctccctcctctgcctggaacttgttcctgcccacctctagcacccacccgaaacacacttttctaggggtcggagacgacccccttctaccctcccaccctgggctaaatcccttctctgtgttccctgggtagtctagacgaatcctcagaaacctctaacacttagaattcttttaatttaagtctcttctgaaaggccatatatagtcctggaagacagggtcccagcaccggcacagacacacagtaactatgtgtcatcaaagctacctgtccttccaccgaagccagacaacagctcatttccaacaaggagagctgatggcctcatttcaaagagaaaaggaggcctctccacccaaccttccccaccccatggcagcatgggatgttgccaaaccgggcacagcaggggcaaagcctcctcaggctccagcagcccaaaatccctctgccactgcctcgtcccagtcccacaggtaggaagagcagcccagggtggaccacaggagcccacactcccaggctctccactctgcctcccactgcagctggggcatcctcctatggtgatgagcaggaagaggtcgtaatctgccaaaggagaaaggaccacatcctcctcccagcagaggtgataatcatctctgccatcgaggcccagggacctacttgcttttctaatcttactttgggggaagtggaaaaaaaaaatcaaactgaaccagggcaaattattctacaaaggcagttctctgatgaaaccagcctggctgggctttggcctggcccaattgaatctatgcttaaatagacgtctgctgtgtgctggcttaaccaattatccgtagggcactctgggcctgaagtctcacccaggcgccaggcatagagggatgcaccccagcctggcctggttatctcacagcacaaacaccagaaactgtttttaagataactgtagaaaagaacaggattttccagcattccgcgcagtttctccctgtcttcaggaggaatgcaccaccctgaatatgatgagcccatttccagtgttcttgagcatgaacagatgaggacaaaagggtgccccagcctccgtgggtccaccggcccctggagtgagagatgcatggtcacactcagtcccagccttgtctgccccaggggatgtgtggggtggttgttagaagtatgatctacaaggctgacagccccatgagaggacaaaggccacctcctccaggaagcaacagagaatcatggctcaggacaggatgacaaagatgccacctaagaagtttgagcaggccaggcatggtggctctcacttgtaatcccggcaccttgggaggccaaggctagaggatctaaggccaaggctgagcacaggaattcgaggccagcctgggcatcacagtgataacctgtgtctacaaaacatttaaaaatcagccagatggccaggcacagtggctcatgcctgtaatcccggcactttgggaggccgaggcaggtggatcacctgaggtcggaagttcaagaccagcctgaccaacatgcaggaaccccgtctctactaaaaatacaaaagtagccgggcatggtggcacatgcctgtaatcccagctactcgggaggctgaggcagaagagtcgcttgaacctgggaggcggaagttgcagtgagccaagattgagccattgcactccagcctgggcaacaagaacaaaactccatctcaaaaaaaaaaaaaaaaatcagctaggcatgggagtgtgcacctgtagtctcagctactcgggaggctgaggcgggaggatgacctgagcctgggagtccgaggttgtagtgagccatgattacaacactgcattccagcctgggcaagagcataagaccctgtctctaaaaagagaacttggggcagaagtcagctcaggctctttggccaggaaaaaacgtgccaggaaatgtgggcactgcacagcctcacagagagtccccagctcatggccacgctgtgggcatcaacatgcctggaggctgctcaaacagacagggaggctgggaggcaaagtctcctaccccatgtaggcctactctcctgctacagaccaaaaatcacaaaaagtagatgaggcaaagatgtacttgtgcaaccttatttttttccttaaacattcacaagtcacagcactgcctctgagcattaaaccctgaattaagatatcaattaactgagatctaaacactccactgattaaaatagtagtgagacaaggatgaaggatttccaaaatcagcctctaagcatcaaagtggcaccgtgttgaacaaaactcatttaaagggccaggaattccatctctcctggagatggatgtgcagggaatgattctattggagccaggtgggcgggaattcaacaccactgaacccgcaacaactatccctcccacactccatgacccagtgatgcaaaggataaaatcccacaaggggaaggacagaaagaaaagagctggttggaattacatatcctctggggaatcaatcaataagtcctctccaagaaaccaaagccatgaagaaaatgatggtttagctcagctgcgagctgagtgtgcctgaaacctagccagggacgggcagacgtggggcagaggtccacctccacgctggaccagggcctggccacgcctttccttctgtctgatgctcccacatccatctcctgcctcctggcgcgcagtgactcaagttctcactctcccctaggagtcccacttcccatgtggctttcttgctggcgtagggttaaatgcctattcatgaggacacaaagatgagcaatgctactggaatccttttcacagacacaccgagaatttaggtcatcatctacgtatcttttctaatttgggacatgttacccaggatgtagaatcctgggacacgtctacctgtgaaccaaccacagcttcccatctcctgtgcacacagagaggccggggagcagaaatagacatgttacccaccgcctgattaatgcatgcaggacacttttcgttctgtgtaattaacagctctaaaaccggcagatgactcaatttaacacagtctcgcttaaaacccaagaaggcacacggcaattgctgacacgcctgctctcccctgacgcttccagaggtacttaaccgaaacccaaggcactgagctatcaggtggtatgaaagcatctccttttatttcccaccttgccttcagatcaatttaatcatctgcaaaacagtaaagcagaaccacagcctaaattatggaagtaagatgcctgctcttttgaagtttcaacttttgaccttcacattcaaactgcactacccagcacaagaaaagaaattatccagttatgatctcatgtttgtggggaagagtatgattatagaggaatttacaggcaatcaaaaaggcgctccttgagagaatggaaaacaataaaacagtcacaggaaggaaatgaatgacagccgaacaaaaatgagaaagcgagtttgcctgtgctaggagaggctgcttgctgccttccaatcaagacaggctcctgaggaaccctgtgtccccagccaagctgctagcagaagctggggtgcatgtgggtgccaaggaagccaagcatctgccccctggttctccaccctactataccctggccccagcacaagaccattccaagggtgctggaccgtacgttcagtgggaccagcagtgagctgggaggatgactgacactcaggcagccccactccacgggtgccccctcagagctgcaaggagcagtgcaagagcctgggatcaacagtctgggctcaactggcattttcttgggcaagtcactaacttccctgtacctcagtttcttcatctgtagcatggaaataactagaacacttacctaatacaccacaaatatctttaaatacagtgacatgtgttaagtgcttagcacaacaccttgtacacatggagtctcaacaggtgacagtcagtgttatcaagatgtgccaggctgcagcctggctaacatgatgaaaccccatctctactaaaaatgcaaaaagtagccgggcatggtggtgcgcacctgtagtggggaggcgggggctgaggcacaagaatcacgtgaacccgggaggcggaggttgcagtgagccaagatcatgccattgtactccagcctgggtgacagagcaagacttcatctcaaaaaaaaagtgccaggctgggtgcggtggctcacgcctataatcccaacactttgggaggctgaggtaggaggatctcttaaggccaggagttcgaggccagcctgggcaacacaggagaccccatctctacaaaaaacagaaaaattagctggatgtggtggcgtgtacctggagtcacagctacttggaaggctgaggtgggaggatcgcctgagcccaggaggtcaaggctgcagcaagctacgatcatgccactgtactccagcctgagagacaaagtgagatcctgtctcttaaaaaaaaaaaaaaaaagacatgccagtccttcacttatactctcattcaatctttgagcctactttgcaggtgaggaaactgaggctgggtgaatcttcacatccgtaccatgagttaggtttcaccacatctccgttttacagatcaagaagctgaggctcagaaaagtcaagtgacttcctgagcagggaggagatagggctagaattcacatgtgcccgagttgatggtttcctgttatccccataaccctcccacagagagagggtggtgaaggcattcaagacctaagggcaaaagatgagtccctgagtcgtaatctaacatcatggaaagcccacccattcctgttaataaaggacccgcccgctgccccacacagcatccttccttcagtgccccagggagtgtgatgatcatgactacagtggacccaccgagagtgactgggacccaggctattaaaacatacccctgagcagcagggacaatgtgacatttctaaaatggttctactgccatcaactttctgctgcttgctttaataaagttgggaggtatgcttaggaacgcgggctcgacctcaaagcctcgaaaatgtcacttgaattaaagcatgcttctttgaaagtgacgaattaatgacttatcccttaggagatggcaggagtacaggacccagccatggtctccaaggcacccaagctgtaagtgaccacaagggaatgtcccatgtgaggcagtataagtggacatggcccattctaagtacccaggatttattcttctgccaaatgggggctacagataggacaggctctctggtttctcttcagatcctatgaatcatttgccttttacggacaagtcaggcatttgttactttatttttttgagacaaggtctcgctctgtcactcaggctggagtatggtagcataatcatggctcactgcagcctcgacctcctgggctcaagcgatcctcctgcctcagcctcccaagaagctaggactataggagtccaatgccgtgttaggctaattttttaaaattttgtttttgtagagatgggatctctctatgttgctcaggctggtctcaaactcccggcctcaagtgattctctcgtgtttgtctcccaaagtgctgggattacaggcgtgagccaccagcttggctttgttactttataaaaacaagaggtggctgtgaacttgaagaacaccagccctgtcttcacagagtgtggctgtgaggggcgtcggacccactggcctctaaccccgagggtcagtattagcgcctgtcatcggccctcagttctccacccccagctcagccctctctcccactggcacctacctcagactcaacacaccccaagtcccagatctgccccggtatctggccctcccagttgtccccatctcagtgacacaccacctagctatgcgggacaaaaacctggagtcaccttcaactctgcccttcactcacgcatcataaccggtccctcccaggagctttccctcttgactgcggcttcaccactcagatctgtcctgccacagccctccactgccagctggacccctgcaacagcctcctaacttgccacctgttcccacacttgccctacagctgggtctctagtctgaggccaaaatgatttcttattttttattttattttttttgagacagagtcttgctctgtcgcccaggctggagtacagtggcgtgatctcagctcactgcaacctccgcttcccaggttcacaccattctcctgcctcagtctccctaagagctgggactacaggtgcccgccaccatgccctgctaatttttggtatttttagtagagacggggtttcactgtgttagccaggatggtctcgatctcctgacctcatgatccacccacctcggcctcccaaagtgctgggattataggcctgagccacctcacccggctcgaaatgattttttaaatgcaaacccaattctaccattctcctgcttaaacccttcaagggtttcctgtgtttcccattcctctcaagaaaaagtcaaaacggacaccaaggcccacccagccactgcctgtctctccaactgttctcgggctctgctccctggctccgcactggccacacagagccaccaccctttctcttgtttctgtgaacgagtggtccttttgccagggtcactctctcctactccttctttttccacagccgatgcccattcatctttcaggatacctccttggtcccaagctctaagacgaggcgagtcagagctcccagctagacaggaaagaaaatgtgatcatacagacttagggtcatatgtgagaaggctacacatctccttggcaagtgatgatgtggcaaaggcctggccttgcctctcttctacattctcagtacgtgcagccatccatcaaagaaaaaatgccttgctgctgtcaaagagcaatgcgatggcttaggaagaaaactggtggcacactgggatgcgagggccacctccagggcccacagaggtggcgcccagcataagacagctcactttgtaggcagctagtagaagccagttgtgcagcaggtaagggctaacagtatcaccatgggaaggaagaaggtgacagaagaatgcgtagaacagaatgccacctttgtcaagacacatgcgtgacatgtttacctttctggcaatgggattatgtgttatgtttatttctgcccttttcaccatctacctcgtgctggagctatctaagtttggtttacttatggtaggagtttttgtaagattgcaaataagggaaataagtttaactgatgtttaagtgactcacgtcctttcaaaaaaagtacggccagtcaaccaacaacaaagaacaagcaaaacagaaaaggctatgggagaaggttctgggaatctgctttctgaggggctctctgagacggtgtgggcaggaacaacagggcattccatccccatgagccgagcacaacaaacaggcaaggtgaccacaggccgtactcaccactcaacgatctctgggtgaagaatggtattgttgacttcgaacctgtagggcgaaaagaaatcaagcccattaatccaacggtctgtcatgtcccagcaagaactacctcattcaagacatgcacacgtgatgcattaaagagggtcccacactttaatttcatgacttcctgacccacaaaaggcctgttgatcccttccttcagcagacctggcagcctgggccatgtcctccaaatgcagtcagttggagagcaagctttatggctacaaaacaccagccctgatccccactaggcagacagcatagtctcttgtgtcaagtatatcaaaatacacacaataggagtaccagaaggaaagaatgcagagaaagcaaaaacctcaccaatttgatgaaaaacattaatctacatatccataaagctccatgaactccaagtaggataaattcaaagatatccacacctagacacatgataatcaaactgtcaaaaaagtatcttgaaagcagcaagagaaaagtattaataattcatcacttacaagggatcctcaattagattattagctgatttctcatcaaaacctatggtggagagaaggcagtgggatgacatttaaagtgctgaaagattaaaaaaaaaagtccaccaagaattccatatccagcaaagccattattaataaatgagggagaactacaacatcccagataagcaaaacccaagagaatttattactagcagacctaccctgaaagaaaaaccaaagggaattgtttcaaataaaatgaaaaggtactgcagagtaacctgaatccacgtgaagagaaagagagcactggcaatggtaaccatacagataaatataaagacagtataaatgtattttttgtttgtaactccttttctctcctgacttaaaagacaactgaataaagcgataattgtaaatctgtattgataagtacaaaatgaataaagacgcaatccacatgccataacagcacaaaagagaatgaggaaaaggagacatataggggcaagcttttgcatgctatttaaattaagctgacattaatgcaaactagattttcaagtttaagtagtcaattgtaatccccataatcattaagaaaacagctaaaacatacagaaaaggaaatgagaaaccaaaatgtgacaataaaaaaaaaatcaaacacaaaaaaatgtaatggagaaagtgaggaacaaaaatgttataagacatatagaaaactaattttaaaatggtagagtttttccttatcaataattactttagatgtaaatggattaaattctccaattacaaggcaaggattggcgaatgaattctttttttttttttaattttaagttcaggggtacatgtgcaggtttcttacataggtaaacttgtgtaatggggctttgttgtacagattattctgccacctaggtattaagtctagtgcccattagttattttgctatttttcctgatcctcttcctcctcccaccctccaccttccaataggccccagtgtgtgttgtcgccctctatgtgtccatgtgttctcatcatttagctcccacttgtaagtgagaacatgtggcatttggttttctgttcctgcattagtttgctgaggataacagcctccagctccatccatgttcttgcaaaggacatgatctcattcttttttatggttgcatagtattccatggtgcataccataccacattttctttatccagtctaccactgatgggcatttaggttgattccatgtgtttgctattgtgaatagtgctgcagcgaacatacacatgcatgtgttgttagaacaatttatattcctttgggtgtatactcagtaacgggattgctgggttgaatggtatttctgtttttaggtctttgcggaattgccacgctgtcttccacaatggtttaactaatttacactcccaccaccagtgtgtaagtgttcctttttctctgcaaccttgccagcatctgttactttttgactttttaataaaagccagacagaatgattttttaaaatatgatccaattatatgctctaaagagacacactttagattcaaagacacaaataggttgaaagtaaaatgatgagaaacgatatgctacacaaacagaaacgaaagtggaactagaatggctatactaacatcagacaaaataagccctaagatacaaagttttactaaagacaaagaagggcattttataacgataattaggtcaatccacaaagaagataaaacaattacaaatatatgcacataacagagccctaagatgtatgtatcaaaaactaacaaaattggagagagaaactgacaatagttggagacgtcaataatctactttcggtaatgaataaaacaattagacagaagattaaaaaggaaacagaagacctgaacaaaaacgcggtggctcacgcctgtaatcgcagcactttgggaggccaaggcgggtggatcacgaggtcaggagatccagaccatcctggccaatatggtgaaaacccgtctctactgaaaacacaaaaattagcagagcatggtggtgagcgcctgtaatcccagctactcaggaggctgaggcaagagaatcgcttgaaccgaggaggcggagattgcagtgagccaagatcgcaccactgcactccagcctggcgacacagcaagactccgtttcaaaaaatatatatatatagcgtgtgtgtgtgtgtgtgtgtgtgtgtgtatatcaaaaacctaacacgtagctctaaaatactcagccaatagcagcagaacagccattttctcaagtgcacatggatcattctccaggatacactttatgttaggtcacaaaacaagttccaatacatttcaaaagactgaaatcacactaagcatgccctctgaccacaatggaatgaaataagaaatcagtaacataaggaaaatagaaaaattgacaaatatgtagaaattaaacagtagactcctaaataaccaatggatcacgtatcaaaccttacaaaggaatgaaaaagggggaaattactactgactttacagaaataaaaaagtttataagggaatattataaataacatacagtaacaaattggataacctatttgaaacaaatccctaaagacacaaactattaaattgatataagaaatagaaaatctaggctgggcgcagtggctcatgcctgcagtcccagcactttgggaggctaaggcgggcagatcacctgaggtcaggagttcgagaccagcctggccaacattgcaaaaccccatctctacgaaaatacaaaaattagccgggcgtggtggcttgtgcctgtagtcccagctactcaggaggctgaggcaggagaattgcttgaacccaggaggctgagcatgcagtgagccgagatcgtgccattgcactccagcctgggtgacaagagtgaaactccatctcaaaaacaaaaaaaagaaagaaatagaaaatctaaacagaccttaacaagagatcaaatttgtaataaaaaacttctcataaagaaaagcccaggaccaaatgtcttctatgaaatgaatagaaattctatcaaatgtttaaagaattaacaccaatcttcataaactcttaccagaaaagggccaggtgcagtggctcatgcctgtaatcccagcactctgggaggcagaggtgggagaatggcttgaggtcaggagttcaagaccaacatggcaaaaccccatctctactaaaaataaaaaaaattagcccagcgtgatggtgcacacgtgtaatcccagctacttaggaggctgaggcaggagaatcacatggacccaggaggcggaggtgcagtgagctgagatcacaccactgcactccagcctgggagatagagagactccatctcaaaacaaacaaataaacaacaacaacaacaacaaaaacagaaaaggaggcaatacttttcaaccactctacaaggtcagtattaccttgatgctaagctagacaaagacaccttaagaaaacaaaattacacacccaaattccttgcgaatagagacaaaaatttttcaacaaaacactagcaaacagaatccagcaacatataaaaaggatatatatacatcatgaccaagtgggattttttcccaggaatacaagattccttcaacatacaaaaagaaatcaatgtaacacatcaatcatattaatagaacacataataaaaccatatgcttgtataaatagatggagaaaaataaactgataaaatcaaacaccttttcataataaatactcaatgaactagggagggaagggaacttcttcaacttgataaagagcatctacaaaaaactccctcaactaacatcatagcatactgaatggtaaaagactaaaagctttcccctaagatgaggaacaatgcaagcatgtctgctgtctccaattctattcaactctgtactggaggttctagccaaggcaaacaggcaagaaaagacatgaaaggcatccagacgaccctgcaattccacttctaggtatatacccaagggaactgaaagcatatgttcacacaagaagtctgacatctatgctcatagcagcattactcagaacagccaaaagttggaagcaacccaggtgtccaccaactgatgaatggacaaacgaaatgtggtacgtatccatagaaaaaaatatttttcagccataaaacaaagtagtagtgacagaataagcaagcagggaaatcaggaaagatatagaagatataaacaagaaattaaccaacttgacgtaattgacatatacagaacactatggcccataactgcagaatacatgctttctttaagtgtatgtgaacatttatcataatggtcacgtgctggaagtttcaacatattttaaagggctgagatgcagagaacattcattaatcacagtagaattaaatgagaaatcaaaaaatatccatggctcaaagataaaaatacaatgaaattagaaaataacaatatgaaatatcataacctgtgagaaatgcagctaaagcagtgcttacaggaaaactcatagctctaaacatacacagcagaaaagaacactgaaaatcagcgatctaaacttccatcctaagaatgacccttgaagaaagcaatgaaataaaaaggaaccatataagaaaaatctacaaagccaaaagctgctcttcgataagatgaacatcattgaaaaggtgaccccaggagacaaaaggatcaggtcagagcacatctctgacacaagagaaccctgtgtgacacagagctcaagctggagaacaaggtagcctagcacaagctataggcctcagcagagaagcctcggcaagacttcaactctctggattccaagacctgctccttagccaggtgtggtggctcacacctgtaatcccaacagtttgggaggccaaggcagaaagatcacttgagcccaggagttcaagaccagcctgggcaatgtggcgagactttgtctctacaaaaaatttaaaaattatctgggtgtgttggcgcacacctatagtcccaactattcagaaggctaaggtgggaagatcgcttgagcccaggaggttgaggctatagtgattcatgattgcaccactgtactccagcagcctgggcaagagtgactcttgcccagtctctttaaaaaagcctgtctctttaaaaaagaaaaaaagacctgccccatcttagggaaggatagcacacacaagcacacgcagggtcgtgacctcctgtcctcctgccagccagggaccctccatggcttcgttaatggtgttgaaaacacctatgtaatgccatggttgtgaggccagcagcccttctagctgagccaactgaacaggggcagggacaggggagagaagagagaagggggtaacagcagactgagaggattccagatgtctgaagctttcaggatccttaactatacaaacagaactatatgattcaaagtcaacctaaatgttgtggaatcaaagccttacttatgaaatatcaaagagactacgggcagccagtgtggttcaaagtgaagaacagggcagcaggtgacataaatcaaaactacaaaatagactctggctcccactgcaccaaatgccactttgaccctaggaaaagcagtggccaatctactcagcagccaaacacaccaccaccatttcatcttactcaacgtacgtacgcatacacacgtgcacatgcacacaagcagcaaagtgacccagcacagagtgactcagcacatagacacagatgcacacacgcagacacacagagacaggcatacgcttggaaaagaggcacacacggacacatacagccatgtgcacaacaggggcatgctcggacacacatagatagaccccactgtatatgcacacacacagatgtaggcaggcatgaacaggaacacatacacacaaacacacactaaggcacaagcttaggggaatgtagacacacatatacacacacatactcagacaggcaaatacttaagacacacaaaaagatccacaccctgatatacacacatacaggtaaacacagacacagatcaatgtgtatacacagatagacacacacacacacactcagacacaaaaatatactcagagaaacacaatcagacacacacggaagaatccaaaagacaaggttaacaggttgaaccctgggtaataaaattcatatagttctcatttttgcctccatgctggttagcattttctacaatgagcatgtattaatcgtgtaaaagtatcaacgaaatcccactgggcctgtgagggtaggcgtgccctggaagcagagtgtaatttcctgatgagctctaaatgtgggctgggagatgagagggccaaagcccctgtcccaggccactggcttctttccgggcatatctcacccaaagatgaggcagcccctccactctgctccctgccaaagggttgggtcaggttctcacctcttgagggtccctcccctcaccgagaactccatgggtcacaattagaaagccaatcctggctgggcgcgctgactcacacctgtaatcccagcactttgggaggccgaggcaggtgaatcacctaaggtcaggagctcgagaccagcctggccaacatggtgaacgctgtctctactaaaaatacaaaaattagccacgtgtggtggtgcgcacctgtaatcccagctacctgggaggctgaggcggaagaatcattgcaatctgggaggtggaggttgcaatgagctgagatcgtgccactgcactccagcctgggcaacagagcaagactctgtctaaaaaaaaaaaaaaaaaagaagccaatcctaaatattaacttgatatccaagttaacagtaaccagaaaaccacggtcctcaaaccacagattggtattttgctgtaatcgtcaagttttaataatgtccctctacttcctgggttttaaaattcacatcttcggatattaatattcctgcattaacaacccccaaattcagaatttcatctttaactgcttgcttaaatggaatcaattcgttaccaattgtcttcaaatatgcagggtgatctaagtaaatgccgaaagataagaaatacacttagcctgaataagtgtatttcttacactgatgtaagaaatgtaaaatactgaccatatacaatggcaggaaacggagcccctgtcactcgctgccccggcccagggctcctgggtacagcttctgtctgtctgggaggcgactgccttgtgccaagaaggcaccctcgttaaggcatggaaacttgatggacaggcatccctcagctcaggccacccagcccctgccaacaatcccccaacagaccatctctccttcatggtcagtctcctgctctcaggaaaacctgccctaacgtctacctccttagatgttttcagagatctaccatgtctgactttgctcccagccttcaggagccaagtgttccagggagcctatcttgccatccgcaggaagaagtctcaagtctcttgctgcagggttcccctccccatctcagcccccactagcccccaaaccaaccccccatcatgcccccgccaggacctggcaatgagcacccgaccccatgcccacacccacccctcctgccagagcccgcagcaaagcctgctcttcccaaatcttccttgggactgctccaatcaagccacacacggaactgctgcctgggccggaccccaaactcacaagcccctacagaccatcccggcctacacccttcacgctactgtcatcacaccgagccacatcactgggtgagcccaggggcctcagtccacagggtctctctggccgtgtgcatgcccaccaccctcagcccacctctgccctgtcccctctgctccttgtcctctgctgtccccacacctcgagaccccacacactcttactgcaggcagcaggcggcctggccctgatctggggaggtggagggaggtctgagaccaaggctgagcccaaatgggacagaccccaggccaggcaccccgagtagccacacctggaggggtcctggcccaaccatccagctggaccagggtcccaagggtataggctgggtggacaggtggggaccactgtctaccacaagctcctcttccctgcaggccaggggataaggggagctgggggggcccatcaggtcaaaccaagaggccaaacctgaacttctgttagaggaggaggtcaatcgaagcccaaggtgcaaggtgctgcagagacatttaaaagggtcaaaaaggacaatgccgggaacaagcagcttcatcagagcagtgagaggcaactggggcggaagcagctgcgtattggagaggaggacgacagcaagattcatcttgcttgggaaacaggctattaatatcccagctagcagctggaggtgcacccggcaggcaggggaatgcggttgctgagcggcagcggctcttggggacgtggtctctgcccagcccggcacaaaagtgctggcagcctgggtgagtggaaggcagggggatgagctgcacctggaccccaggaatgcagacaagactgtccacagggaagcggctgggagcagctggaggcaaaggctggggccccatgtcaaggcccacggcatgcagggtagggggcaccagccagagctcctgcctcagtgaaacagccctggtggcagtgaggtggaaggccccgaggggagagacatgggtggatggccccctgcaggggacaaggaagggagggaggagaacaagcaggccagagatggccacgagggttctcacccgctgcgcattgcaacagccaagtcagagactcggccagcagcccaaggcgtaggtgcggaaactgacgcaccagcacccggggtggggggcagtgtctcagcccagcccccagctgaggggccgggtgagcaccccccagtcagccccagcctggcctggatcagagattggagaggtaccagcccggtgcctggggagatggtgcaaaagtaaggcagtccctggctctccaaaaagtgtcccagtggtgacagggtggggtggggagtttgcagagcacaggctcctctgggctcttggcagaggccacagggactggggggcaacaggtgacagagactgggatgagaggtcacacctaggaatcctcctggggggtagaacgagacctttgcttcctgacactcactgacagtgatgagggccctggggaagcccagggccccacctgccttcctcggggaacctcaaggagcagctggcagagctctgcttcagaggccacatcttgagctcctggctgggaaccacacccaccacacagctgccagacgtggtccaggggggctcagcattctctctagaggaggagcaagcaaagctctcaccgctgagaaggccctcgactcactgacatctgggaaactgggaattggtgatcctggagcccacctggcccaccacgcagatggggagactgaggcacagaggagcaatgggatttgctggggtttgcatgcgggcaactgtcactgagcaccagctctgtgccaggctccaggtgagcatgatctcctccagtgcccaccacaagcccaggcagcaccaggttacacgtggaggagctgagggtccccctgctgcagagacccaaacagaggccatagagaggttccatggcatggtcgaggaaaggtgtgcaggacactggagacccagcaccaggtagtgctggggggattcagggagtcccgggactgggacaggcagcagctggctgtgcccgtagcccctctgagggcctgggggcctggggagagagagcagctccatggccagcatttcaacaagctgggctaattgctgccaggcgtgggaggcggggccgctttggggaaactcccaggaggacacgaagatctgtgcagtgaaaaagcaaacctactacccgcccctccacccgccccactgctcttagcatagggggaggtgggaggtgatacatattcatgagctcataatccctcatcacccctacatcacacacagagattccagcagcttgggctcatacataattataaggcggttcctccatcactgccttggtccaccagaggacaacagaagacatgggggctgtaggggatgcatgataggggaggggctggggatccaggtcccaaagttggggctgggagctgcccactgtccacgtgcagcagcctcgagcgcaggggccttgtctgctatggcatcagccagcaatgcaggccacagacccccagggccagtcaccagccagtccagggacccaagcacatccagtgggcagggctctcccgccctctccaggctctcccgggggctgtgggtgaggggtgacaagcaggggaggggcgtctttccctgtgcccaaggtctgtcctcctgcctggagagaaaaggggaaccgcttcccaagcagggtttggaggctcagcctggcgcttggttaagagtgagaagaggttaaagggatcctgcctgggattaggacagcaggggacacaggggagctgctgagagccgggttggaaggggttaatggctgggactaagagagggggcttgggacaggcacggtgtctcacatctgtaatcccagcagtgtgggaagctgaggtgggtggatgacctgaggtcacgagttcgagacaagcctggccaacatggcaaaaccccatctctactgaaaatacaaaaattagccgggtgtagtggcgggtgcctgtaatcccagctactcaggaggctgaggcaggagaatcacttgaatccgggagatggaggttgcagtgagccaagatcgggccattgcactccagcctgggtgacagagcaagactccatctcaaaaaaaataaaaaaataaaagaaagggggtggtggcttgatgcacagaccacaggggctcacagcagatgtttagagggaaaacaacccacctgtgcctgcccctgcccttgcccctgcccctgccctggccagggctgcctgagcactttccttatggagcaaacagacacggggcacctttccttcaagaaaaatcaaggtgatttttggcaaattatgcttctaaacatttcctcaaaatgcccaaactccttaaaaagaagtttgcatagttcatgtcttatttgtagaccgggaaagacctgctagtgaaggtgggagtgggggatggtggggaaagagtccctgggggcccaggactcacttgctgatgccgtcaaaggaggcctccctgcagacactgccgctgtccgtgttgacgccacgctggggagagagaacacagacatgacacacggggccgcatggcgcccccacagcctgcacccctgaggcctccagctaggctcaggacaggtaagaacaggatcccctcctgccttcccccaacagatgagccacccagccaggtagctccaggcccggccccaacacaaggacagacctctttgctaccacttgccaagtggaggaagtgggggccccccaaactctgcagcatcccagctgcacagcaaggccttctccatggaggtcagagcactctgctgaaaccagccaggctgcccaggcacaggcgaggacccgggaccactcccaatataaatctgctctccccagcctggtccatcttccctctcctgcacacactccccactaactgtataacatccgaaagagtcctgtcgaacccagcccttctggggaggtgtgcaggacctgactgtggcaggactgctgtgaagcagggagacatccctctcttaactccaaggagactccaaatgggacttggacaggaatggagacaaaacaagggacttggagaaaaatgggccctctccagaaaggcaaggcattttatttcatttattttacttatttttttttgagacagtgtcttgctctgtcacccaggctggagtgtggtggcaccatctcggctcacctcagcctccacctcccaagttcaagtgattctcctgcttcagcctctcgagtagctgggattacaggtgcgcaccaccatgcccagctaattttatatttttagtagagacatggttttgccacgttggccaggcttgtctcgaactcttgacctcaagtgatccgcgtacctcggccttccaaagtgctgggattacaggcatgagccactatgcccagcctgggcaaggcattttaaatcaccatttctttacccagaacttcagcttgatgtctaattgtatatctaaattgaacacattggatcatctatgaccataatcatctcacataagtttcccttatagccatcaagacagtaaagcaaaaaaaaggggccaagtgctaaaggaaataactattttggtaaaaatcaattaagaaaagagaaaggctgggcacggtggctcacgcctgtaatcccagcactttgggaggccgaggtgggcagatcacctgaggttgggagtttgagactgatcaacatggcgaaaccccgtctctaacaaaaaacacaatattagctgggtgtggtggtgcatgcctgtaatcccagctactcaggaggctgaggcaggagaattgcttgaacccgggaggtggaggctgcggtgagccaagatcgctccactgcactctagccgggcaacaagagcaaaactccatgtttgaaatgtttgttcttcagtgccataaagaaatagcacttgaacataaatttaatttatttagtaaggccattttcacttcctgcagaaagggtacactctccagcagttttgccacgagagttcaccaaacaaaggagacagggtcgtttataacctggcgtgtccaccctactgctgtgtccggtttccactgcctggaacgggaccccacattctgtatttgtcccgattggctagcaacttagaactttttaaaagaggcaaaggtagagggggagaaaggaaggaggaagtaacttgtggaatgctgagaaaggtaaaaacacttttaaataaggaagaggaacaggctatgaccttatgtttgcttggaccagtataagcacatcagggcaaatatttaggttaaattgtgggagctaaaaacataaagtatattgatttctttattacagctagcagatatttaagaatgttagcacaggtctttgaataaattttgcttctaagagaagttactgtttatttctaattagacggggaggaaagtctttgaagagaaacctctactttactttttatattccatttcaaaaaaaaaaaaaaaaaaagacaagagggaagggtcactttggggggaaggcttgtggacatgcctcttatatgaaactcccaagctcaaagaagtgtaagaaagcacacttctctgagaaattccagagaattctttgggggcacaccacagctcaagtgcccccaaaaccctgccggcgtacccagagcccacctcgcaccccccaccctagcccaggccctcggtcagtcactgcgccccacacccctgctaccttgagggcagacgcccggtggtgtggttttcagacccctttaacaggggagacagagggtgggaataaactttcttttttcctttttaaattttttatttttagttttcatgggtagatattaggtgtatacatttatggggtacctgaaatattctgatacaggtatgcaatgtggaataatcacatcaggatacatgagctatccatcacctcaagcatttatcctttctgttacaatccaattgcactcttctggttatttttaaatgtacaataaattattgttgactgtagtcaccctgttgtgctatcaaataccagatctgatttgttctacctagctatattttggtacccattaaactgactttctacatccacaaattccaggagctcagcctgacacaaatacatcttctagccaggtttaaccttaggagtgggtgtggcgccaggcccacatcctcacgacaggacacagcaggtcccagggagactcaaggatggggtcccataaacagctattcagactgagcaggtatcgctacttatcactgatgaccattcctcttggtttatttttttctttttttgagacagggtcctgtctgtggcccagactggagcacagtggcgcgatcatacctcactgcagcctcaaactcctgggctcaagcacgcctcccacctcagcctcccaagtagctgggaccacaagcacatgccaccaggcctggctaactttttaatttgttgtaaagacagggtcttgccatgttgcccaggctggcctggaactcctggctccaagcgatcctcccaccttgcctctcaaggcacttggataacaggcgtgagcccctggacccaacccctctccgttttttaatcctcccctatgggcccgacctctgcaggagaggtggcccccataaaaaccctccccagagccaagcactgccccacccctggacaccagccacttaccaaagtgaggaggacagagggcttctgtgacgtcaggacgctggcaatctagaaggtcggaaagaaaaacccactttagaggcaccactaagcctaatgaagatgacatgccaccattccttcataatgacagtgcacatttatcaagcagatcattagaacaggcgacgtgggcgctgccctcaccctgcaggtgaagaaacccagcttcccctggttgaaggacttctgaaagccacacagccatcgaggggcagagaggataaacctacacctggctcgcttcccaccgcaccgccctgcttccaggcaccacacagatccctggctccaagcagccagccctacccaccctccaaggccagcccctctgcccatctgcaaagtccctgctcaaagacccgtcccccgggaaccctttaggctccaggcctaccagcctctggttcctagggcagaagactccctccctgctccccattcaacccctagacccaagggagttggccttccccaatcccaccctctggcccccaccccacagcccactctctgtccctccaccatgacccacttggacctcctgccactgcaagccagttacttcccggcccaagcccttgcatctgcatgccgggccagctcctctctccacgcctctgctccagctcttatctctccctgagtgccttcttcccatcttagtgcctcatcaatgtgcactcaggatgaaagccccagccccctgggcaggttcgttcactccctcctctactgccccactgacagtcaccattcccccagcaaagtgccatgtgccaaccagcctgctgggagcaatttcttcctctgccagcccctcctcctcagtctggcctgcatcttggctactgcagaccctcttgtttctgagcaccccctgggcagagaacagtctcatctccacagccctcgcctctccccacacccctatcctaactctttacacccgaaacgcagggggagagtgaggagaacttgttgttgttttaacagcttgattgagtgatcactgacatactctatgctgcctgtatttaacatagacattttgataagttttgacatatgtatacatataccttttttaatactgagatgcctcccaagaaaacctggaacgtattgaaaactataaaaagataaaatgcacgtacaatcctatctccagagacattttagctttgctcataaaaacagagatctgtaatgacatttggatcatatgaaattacatgcttcacttatttcctgtcattatatgttcttcaaacatgcaatttttagcagtcactaccgctggggacagtaaacgtccagtaggtcgctgaagacggcctgtgccagtcatcttacacacagcatctcatttaaccacacggggagacagtgcggcaaacatgcaggtttcgcaaatgagaatggcttacagattagagaacttgcctgagtctggttaaaaaataacagcgcagcccagatttgaacctatggctgtagaatactctcttaatggacactactcattcctctacggacacttaaattacatctaatacactttgggaggacagggcaggcagatcacgaggtcaggagatcgagaccatcctggctaaaacagtgaaaccccatctctattaaaaatacaaaaaaaattagctggatgtggtggcgggtgcctgtagtcccagctactcaggaggctgaggcaggagaatggcatgaacccaggaggcggagcttgcagtgagccaagactgcgccactgcactccagcctgggcaacagagcaagactccgtctcaaaaaaaaaattacatctaataattagcaattataaataacgctgtgatgaacatcctcgcatacaagtatttccttaaaattaaatgccagccagccacagtggatcatgcttgtaatcgcagcacttttggaagctgaggcaggtggatcgcgaggtcaggagttcgagaccagcctggccaaatggtgaaacccccatctctactaaaaattagccgggtgtggtggcacgtgcctgtagtcccagctactcaggaggctgaggcagaagaatcgcttgaacccaggaggcggcagctgcagtgagccgagatcatgccattgcactccagcctgttgggtgacagagcgagactctgtctcaaaaaaaaaaaaaaaaattaaatgcctttaaaactgttgggtcaaaagccacagactttgtcaaggtttaccatgctcctggcccaatgatcctccagacatgtatcaacaatctcccgggatcctccctcatgttactgagtgactgcttggagaatggctgtgtcctttggcctcagtgttgcaaaaaaacaaaaggctcagctgggtgtggtggctcatgcctgtaatcccagcactttgggaaggctgaggcgggtggatcacttgaggtcaggagttcaagaccagcctggccaacatgatgaaaccccgtctctattaaaaatacaaaaaaattagccgggcttggtgactgtaatcccagctactcgggaggctgaggtaggagaaccgcttgaacctgggaggcagaggtttcagtgagtcgtgactgcgccactgcaccccagcctggggggcaagaatgcaactcagtatcaaaaacaaaaaacaaaaaaaaacacccaaaaggttcagctgtgtccctacacaccctcagcccctcctgaaggaaggggagacttattaaaaggaacaggggtacacatgccggccctaggtgtgttgttacgttgatgtgaatgttctgcattcagctgcacagaaggagcccgtcaattacagcagctgaatcagaaagccaggaggcacttggggattgtatctgctatcgtcttgggagggaggagcaggataacaaatgtgtgggctgatggtttttctccgggcgacgactctcaggacatgctggttaggaataatggaggaggggagagcagccgtctccttgcagcccggtgctcagacaatccaggcctgactctgagagcaggctgtgcatctcctagtcctggcagggcaacatcttttattgatcacaactgcttgagtgggccctggttacttctgcggctgcaaaaacctctcccgacctggcagctccacccgcccttccccatggagacccattagtgctacgctctcatcagcacaccctgactccgtgcctcaaatattaagggaacacgacgcgctgtgcgttgctggctcccgatgtatccccagcacacaagacagcacggctctgtcaactcagggcctcgtttccacggagtggtggccactggggacctctcacaccctgcgctgttaaatgaccctgccttgcttcatgccagagccagcatcgatttctccggcagcccccggcctctctggcagatggagctggatggtcacgggcagaattcatcagagccctgtgggtgtacatcctcccctggggacaatcagaggcttcccacggacacctcctgcactttcctaaccagggcccagaccaggcccgagggccgcttttcgcagggtgataagctggacaaaaaagctggatatgcctttgccagcgctgggaaagcctgcaaggctccagagagctggctctgccctgcaatcactgaagcttttgaaaataaaccttctttcgtggcattctcctccaacagtattgcacgctggtggcctgcactgcttttacaatttcaaatttgtttctcaaatgtaaacatcaggaaacatcaccaacagtctggatgtgtggctactcctgaacaatcaggttcctggagccatgggctcgtggtcccacagcacagtggcccctgctgaccccatcgcttccgatgcctgtccctgtgctgctgcggttgtcctcttacatctgtcctgcctgtagcagacttggtgaccctcggaccttctcacatatgcctggcgccataaagggaagcaagtgcatggaacgcacgcttcacctgccagctctcagccggtgatcccgccagcctttgcacagggccttcacggcagagcctcggggccccactcaaggttctgctgaatgcctccttctcaggggaactgccttctcaataaactcaggatcctctgtggggaggagggaacctcggagccagctgtgccccatcagacacctgcatggcatacatgctatcacgtgaccagccatggcactggaggccttcctgccttttttcagaggagacaagcgttggctgtgatttgtcactgacagctaaggccaccccaagtgagatggggctgagcactgcagaaccagcctggggaccccttccctgcataaagggcttcctgtaacctcccatgatgcaacaggccctgggtacctcaagcaacctgggatacctcccagctcagggggttcagtccagcaagtcacactttttggcaggctcccttcagagccacagaaaatcaaaggcacagggagtccatgtcgcctccacaggagtgtcctacagcagccctcctttctgaggggaaagggaggcctggaggggaggcccctggcgtcacatcccagtaccactcccctccagctgtgggactgtggacgaggcctttctctctgagcctcagcctcatatctatgaacggggtgggggctacggcccagcacagtccctgccccgctgtgtccctcccgcagcgggagggccaaggggctccaagagagctctagtgttactggagcccacgtgggccgccccagcatgaagcgcttgctctgctgtcaacgtgagccttgttcccagtaaaaacagcagcagtaacagtaacatcaacaccaatctgcaatggcagtggcgttgacggggtgcggtggggtgctcccgaaccctaaagagattctagcctttgaactctactgaagcctcgacaatctgctttgtatacgaagacgaagaatgagccggtctctgtgctgtcattctgtgcaaccattaacaacttccctgccctaacactcaaggtggcctgtctcttactttgcttagagaccagttctccttcctcacccccagaaatcacagtagacacggagctgaattttcccccagttataaagacaaaaatgtcagacagtggctggggaggctgtggtccagaggtggctcggactcagcagctgagtccagggcagaggcaggtgccggtcccaccacggtccttgagacagggtcctggaggcaggtgcccatcctgccagggtccttgagacagagtcctggaggcaggtgcccattccaccaggatccttgagacagggtcctggagacaggtgcccatcccgccacagtccttgagacagggtcctggaggcaggtgcccatcccaccagggtcctcgagacagggtcctggaggcaggtgcccatgccgccagagtccttgagacaggatcctggagtcaggtgcccgttccaccaggatccctgagacagggtcctggaggcaggtgcccatcccgccagggtccttgagacagggcccaccccaggctgcccctccaggtttcacatcgaagagacctgaagggtcaaggtttcaaaggacaacagtgttaagaaacagtttctggggcagggaacacatctgccaaggagagggtcggaaggaaaacgagaatgaaggagtaggtgcctcctgctccacttctgagacatacaaggcaagtggcagatggtctcattgggagcatgcaaataaacgttccgtctattttagatcctgtactcaacgggatcaatatgataggtcacatgtgtattgacagaatcttcagatgttaagagtcacccccaaaagcttgggattgaaataacataacataaagatccatcaaaagcctcctctctccacagtccaaccaggcagaagatgctgtagagacaggcccccgtggccctgtagaggtgggcagtgcccttcacagaggctcttccagggatctctgcccaggcaccaccaccctgcggtgactgttcactcatgtggtcacctcctgcactggactgtgccctgggctgttgaggtcagccctgggtctcggccacctctgatgccctacatgtccctgggactgggcagggaaagagtgcaagaggaacgtctggggaaaaagaactggacgttcaagacaaatacaagacagtcaagggcagggtgcacatcagaacacagtcagcgtccatggtgtccacaacttggtcctgagggctcagggaaggggcaccagtgtgggccagagtctacagcagatacagtggctgctacaaggctggtgcaaggcctcaaaagatggataggagaaagacagagaaatggaaaacatattccaggacagcagtaccgggggcagggctgggcacatggtactggcccacctgcagtcaaagagggctggccacccccgagctggatgggccgggctgggcccccacatgctgggcagagacaactggtctctcacagcactgtgtctggccatgatccctgggaacctgcttctcacccagtgccgtcatcttcaaccaggctgtgtcctgcccaggggaagggggaagctgcttggccgccagaactggctcccctggccacttccacactgcagccccggctcttagcatggccgacacataatctctgtctggggaaatgtggctacaggatggccctgtccaaagctgatgctgccaggtccaggttggactcccagtggcaggcattgacttctgggtgcttcacattctacacggcactgacctgcacaggacgtggggttgtgacagcgcccagggccagagcacagaggcctcctgtgtgccaggcagtggtttagtgtcagggcctttggtcaagtagaccacaggggctcccagctgtgctctcgcctctgtcccagccctgccccactggcaggaaggagagctggagtcgaggagtcagggcagcccctttgacctgcctgaacttggttggcacagattcaaaaccccaagaggacagccacatgcctacccaggccacacgacacctgctggacaaccccactgagaagtggattgaagtcaggggacctccaatgctactctacaagcctttcacagcctcgggcttttctgacagtggcatctgcagtcaaccagggctcgagacacacgaagaccccggcccagccttgtggtgacttagaccgtgtgccaccgctgcaggcaggcccgcctctcagagacacctcatgtaatctcagcggccacaacccaggtcaccagacacttctacccacagagtcaggggccttcccaggcaaagcaatggctccgtagagaagcctgaggcatgggttgctgcctactccttccaaatgggagcacctgcggcgcagggactggtggccaggtggtagtgtccctgacatccagcaaggttgtggcagtggaaggagaggaactccaggagtggaaggcatgctggaagccctgggctgctcagaggaggagccggctacccacctcatctacgtactggacgtcgtccacggcatacttctccttgaagtgctccttggaatggatcctcaaagaaaagcacaaggaatatcagggtcagggcttggtaatggctcagcatggccaccttcctgcctgccaagcccaggccatggagccccagtcccatccctatcacggtcagcacccagcacccagcacccggcaccgaacaggtcggcccaacacacacttggagggcaaaggccattaggccatggagtgacggctgaaccacagctgctttcctcagcaagccccgctcctccgtgaccctagccacctgcagccagcccctgcagacaaaacccctatcatcccctccactgccagagacagtccaccagggcagccagccagtgcacccgtccctctgtggcataaaacaatctgcctgccaggtcttcatggagcatctttaaaggaaagtttattttaaggtcagccgcagaatcccagcactttgggaggccaaggcagacagatcacaaggtcaggagatccagaccatcctggctaacacggtgaaaccccatctctactaaaaatacaaaaaattagggcgcggtggcgggtgcctgtactcccacctactcgggaggctgaggcaggagagtcacttgaacccaggaggcggaggttgcagggagtcaagatggtgccactgcactccagcctgagtgacagagcgagactccatctcaaataataataattattattattactattttattttatgttctagagacagcatctcgttctgtcacccaggctggagtgctgtggcacaatcatagctcactgcagcctcaaactcctggtctcaagcaatcttcctgcctcagcctcccgaagtgctgggattataggcattaggcactgtgcccagccaaaaattagcatttttagaaagtcagtatcagtattactcaatgtgatgagaaaaactcaagcttattcattacccctgaaaaatctgccagtgagaagacacagaatggatgaggttgggcagccctcgtccacctcctgatgggccctttggtcacagctgtgctaggcagacctccagcctgggtccagcaagccaccacccccaggctcttggtcaggagataagtcaatgtctctgttagtgacagagcttacgcaaggggaaaggaacacaaactgcacaggggagacactgagagccaagtccaatgacgcacacatactcggtcctatgtcatcccacacctgggccccacctcatcacacgggctctatccccagccgtgctccagccctccagctgtctgtgacctcacagtgttacagtcaccaggtgctgggtcccaaataggcctcagacaaaaaaacagcagatggtttctggatggtgtttcctgggctgtcaaggggtggtggtgaggcaggagaatagggtcgggaggcgttagggctttttcatgctgacttcctagaactaaattgaaaggaaaaccctaactttccacacctaagtaacaaaggaccagaggctgctccctttgcaaacccccccttttttttgaggcagatgggaaattgaaagtacctctgattgcaagtagagtcttggtttgcaaagaaacgcaactttgtaacttcactttagcctctgattggttgcagaagtgaagttacaaaggttgctttccacaaccaatcagactgatggcaggccaccacttcatttacaccaggcgagcaccaagtggccaatgggaaacctcctgggggtatctggacctgagaagattctgtcactaggccttgagactctgctcagccggctcccacactgtggagtgcactttcattttcaataaatctctgctttcattctttcgttgcttcattctttcctttgtgtgttttgtccaattctttgttcaaaatggcaacaacctggacaacttgcagtcaagaccctctacggataactggggggcgggggggggtgttgtgggtgccaaggataatgtgcctggagaaccccacggaacacggtggagggagagaaccttgggacttggaggtgatgaacttcacgagtgagctcctgaactggtgtcctatgtgccattctcagcctttgtgacactaaggaccagcatcacctgcaggaaacagaatctgctcctctctctgagtcctccaccacttccctccccacccaaaccaggaagtactggccacagggcccagggacggctgcagggagcaacaacaaggagcactgagggcccgggagacgctggtctcaccgtaatcaatggactgctcagtgcagcccacaatgccctttgctttctctcccttttggcttctctgaaatgatcacggggtatcaagctcctgctgttaattaaatttgcatgattcagtcacattcacttgtgcatttgagacaggactcaaaagttaaatggccaaggtctgacacctccattagcacggcctcgagcagttatggggcacgaattgatgacgagcgcctcgcctggacttcggaggccccagacgcagggcttattgtgcagctggctcaagggaagcctacagaccctttgctactgagcaaccacactctcagcaccgagttgaccccacagcccggcacaaaagcaggtgtcagaaatacaaaaggcagggccatcagcgaaatgcgtggctgggatcaacacatcaactcggactttctggctccataacaaacaccctgcgtccctcagttgttcccagctctgcctctagccccctcccttcattgcctccagctgtgacaggagtggaaggcaacctcacggcagagtggggaagtacaaaggatctgattttgaggccagcgccctacagaggggcatctcagccatcagtgtggcacctgaccttgtcacttccactcccgttatgggcctgaaacctcccaactcaccccaactgtgcggagggaagccaccaggaaatgcattcccgcccctcctgccaaaaagcgcctcccaagccagaggtctggttctcaacagaagagccattcgacagatacaacctgaaaagctgcaagcagcttttctggcaactgtgcattgcattctcttttaaagggcagagataattaagtttagatagtacttatttttcatgtttgggggctaattatagtaaaaaccatttaaacgtcatcctaagggatatgcgtgccagactcccacgtcaaaccagccaccgaaggcttggcagccatgatttggtggggttgatgagaaaagaagaggtgtggccacacaagccctgcaaagctggctggagaggcccctgaggggctctggactccctgaggccaggctggccagggcaggaggcagccactcagagggagggcctgcaccctgccctgtggggagtctggggtccagcaacggtacttcatgtcaggccccatcgcatgggaagtctggatggaaacaaccagactggaggccgggcaccgtggctcacgcctgtaatcccagcactttggaaggccaaggtgggcagatcacctgaggtcaggagttcaagaccagcctggccaacatggtaaaaccctatctctactaaaaatacaaaaaaattagctgggtgtggtggctgtaatcccagctactcaggaggctgaggcaagagaatcgcttgagctagggaggtggaggttgcagtgagccgagatcgtgccattgtactccagcctgggtgatgagatcaaaactctgtctcaaaaaaaaaaaagaaaaagaaattactggactggggaggatgggtcagcagagaagctgctgtcaccccacacacactcccctcaaatgccaaggatagctttgggaggagagaggagaagtcctcctacccaaaggggctctcgtcctccacaggggtcagcatccagggaccccagttgggccctggcatggatgagagaggcctttcccagtccccggagtcaaagcccatgactgcacactctgcagtgactgccagcaactgtgggggccacgggtgggaaggagacattaaattaatgccacacagtgcagacacgaggagccctctagaaaatgaaatttcaaaaagcaggtcttgctggctggctgaccacctgcatgcgattaatgaataagtaacagggccaaattacagccatcaccatccatttcccgcggcccggcctgccttcagctacaaacaatgctgcctcgccgactctcactctgctctccacagaaggcagcggcatttgctctgcggtggaagccggcagccatctgaggatgttagctggtcagagacaaaagcagacctcgccacagtgacgcaggtgcctatgcccaaagaccactcccggagcaagcttcctcacaggggccacagagggaacagcgctgcccgggaggctggagaccaggtccagtgaccaggcctgcccagggtcagtgcctcaaaccacccgggcagcagccgaaggagctcctcagccccttctcagaggcctgcacggcaaagagggcccccgacaccctgccaatcacaaggagcgtgggagggaggcaccagagaggctggggaagcctcgatcctggggacacttagtggggcagagctgggaaaaacacacaacacacaacacacaacacaccctcatcacaaacaccctacacaacacacacacctgcacacaacacggcacactcacacccaccacaccccatcacaaacaccctacacattatttactcacacacccacacacccacatacaccctcatcacaaacaccctacacactacacacacccacacacaacacagcatactcacacccaccacaccccatcacaaacaccctacacactacttacacacccacacataccctcatcacaaacaccctacacactacacacacacccaatacaccacactcacacccacaccccatcacaaacaccttacacatcactcacacaccctcatcataccctacacactacacacacaacacagcacactcccacccaccacacccccatcgcaaacaccttacacacccctcagacacccacacacaccctcattacaccctacacacacatccacacacaacacagcacattcacacccaccacaccctacacaacactcacacacccacacactctcatcacaaacaccctacacactacacacacacccacacacaagacagcacactcacacccactacaccccatcacaaaaaccctacacactactcacacacccactctcatcacaccctacacactacacacacacccacacacaacacaggacactcacacccaccacaccccatcacaaacaccttacacaccactcacacacacaccctcatcacaccctacacactacacacacccacacacaacacactcacacccaccacaccccatcacaaacaccctacacaacacacacccacacacacccatacacaccctcacatgcaccctacacaccacacacacagcacacacacacttccatcacaacctacacaccacacacactcccatcacaaacaccctacacaccacacatgcccactcacaacacagcacacacatgcccacacacactccctcacatgcaccctacacacctcacacacccacacacaacacagcacacacacactcccatcacaacctacataccacacaccacacacacacccatcacaaaaaacctacacaccacacacacaccccatcacaaacaccctacacaccacacacacaaaacacagcacacgcacacccacattcacccctcctcataaacaccctacacaccacacacccccatcacaaacaccctacacaccacaaacacagcacatgccccccccacacaacatactctacatgcatcacacacccccaacatatgtcctctccacatcacatccatacgtacccacccctccacatgcaccacaccacacacaggtgtgcactccatatgcacacacagccccccacacatacaccatgcatgtgcaaaccctcccaccatacccgcatccatctctcacacaagatgtgggtatggccctgggaaggctgagcgcccctccctgcatacccagagccggggacggaatgcgttacaaaggttccaggagggtcccccgacctggtcaaactggctccccaactctgggctccgaagctgcctggggcgctgactcacagaggcccacagccaaagccaccctccactaagcccaactccgatgaaaaatgatgggaaatgctctcacatcaaaaagacaccacacactattgttagcagagactctgaataaaaatgcattcagagctaccaccctccccatcccagaacaggcctggggtgaggagtgggccggcttcaggctgcccacggcccctggcgtctgcaaccctgacaacagcaagaccgtttccacaggaagcggcagatcctgcagacgggggtgtcgtttccctgggcgactttggattgcagtatctgccagatggattttcaaaaaccatcagatagggactcaaaaggaagctgaggagctgaaggtcaaatgtgaagtctggtgggttttgcttgcaaaggccaggtactcccgtcagcctcgctcctggtgccctattgattccaggagcggctggaagcagccatacgcaatcagatctggccactccccagctccagtcccacatagtcaaccccgccaccactgctctgttacaactgagccttctctcctgagggctcaggatgtggagactcagacagggtcactccaggacagtggaacggagaggcctgctcggggtggctgtggtagggagccaggacagcaggacacaaggctctacctctcagctatggggccagatgccccctcgggaccaaggctgcctgatctgacctgcccagcatgtacacagccttttccaacaggggagacccctgttggaaacccctggaaaccccaggtggggccctgtttagcccctgatcagaccctccctgaagctgtttctccttctctgtccatccccacatctcacagaggaggcatccgacctgactgctgagctacttctctgagcagtgggacatgtcaacaggctctgagccagcagtgagggccatgaggaggcgagagggcagccaggtcaaaactgcaggtgtcacccggagccaagggtaccctggcacaggggccctcgctcgtcctgagtcgtgccccttgcaagaaaggctgaggccacaactctgctctgggtagagaggggatgctgggagaatcctcctgcagaaagcagacctaaactcttcgtcactgctgtcccagttacaacggctggggaataaacgactccaacacttagtggagtgcaaaaccaccaatcatgttcatggactctgaaggtcgggaatttggaccgagccccgagaggacagcaaagctctgctccacatctaggacctcagcagatggaaggctgggcctcatgcacgctggcggctggtgctgctggcggctggggtccccctatggggagtctgcgcttcctcatgatgtggcggctgggttcccagggcaagtaccccatgggagagaaccaggtggaagccacagtgcagtttacagtctagcctcagacgtcacacagcaacactgccacatccgtcatgaggcccagacctgggacaggcagaagggaaatagatgtcacctgcagacagcgagtgtccagaaacactgctgtggccatttttggacaagacaatctgcctcctggaaccatccctgcctcatgtcagtgtcagagatacagtggccagcactgtaactccagtcctggggggcctccagagcagcatcacagagaaggaactggagccccaaacatgaccagacccacttgcaagccccacggcctctcagaagccacacttagccagcaggcaagctcagcctccaattgcagctccagcaagacctggctgcaggacctgcacaggtcacaccagcacgctgagccatctcctcttttgtaacagggcagtcataaggattccaccgggaatgggataaaggtcgacaataaagatcacgacaggatgggaaggcattgtcaggccagggcctccgaggggcagcccggcagaagccccaaaggcagttggcccgggtgtgtccactccgtgcccttcttcccaggggccgagccaggagaccacccccaggagaaacagtccccttttcttctgctgccaattgtgctccaggctgagtcctgcccagcaaagatcccagtcttgccaggctgggatcctgccaagtggcctaagagcagaatgattaccaacttgtaagcctgaacccctctccctgagacagcaggagcagcacacaccatggccaacgaaggcagaaacggagtctgcactgaagggagggtagcactggaagcaggggaagctccactgtggccccagtcctcagcagagagcccagtccctgtggcagccaggggccttgtcactcaaaccagccacagcctctgcagcccacctggtaatgagcattctggggcaccaggcagcaaaggctgcaatttatacattagcccagaataatcactctccaggcggagatgacacgcagtgaggcagccagcatttagcgggatcctctgatcacctcaaacctccctggttaagtacagtgtccgccctggcaccactgagcaggcagaacagctcctcggcggtggggagtacctggaacagcaggcaccatggagggtggaggagggtgcccagcagcccgagcctctgctctatctcacaggtgagccgggagggcaggacctgcgctgcgtccagaggaaggcagcaaataacacacccagcatatcagcgatgggcctcagagaggcggttccccgatccaaacccaacccaccaccctcaggcacgcacagggccatgccacacctgtcgatgccatgcaggagtgacggcctcgcagggccaaaccctcaggcattttcacagacggagaagctagaatttcaggattaacaaactgcacttctaaacaaacaaggcccccagttgacagggctctgatgagtggaggaacaccagggttcttggtctcgagttgaattagagaaaacgacatggacacacgtggagtggttttaaggagcggagagtttaataggcaagaaggaagggagaagacagaaggaagaagctcctccatatggagacagagggaggggggctccaaagccaaaagaggaggtccccaagtgcagtggacaccagccaagtatatatgcagaggctggaaggggcgatgtctgatttacatagggctcaggggattggtttgaccacgcatgttattcacatagcccactaaaaagctggctctcccaccctagtcttttaatatgcaaatgcagggagccatggatgttctacacatgtggggatatttggggatgttctacacatgtggggcggccatgttgccaggaacatgtgaggcaagggtaagaaggccttgggaattgccatgttgggtggacccagtttctaatggcctgcatttgcatatcaaaggttgccggcctggctctaggagctggggctttaccagaaaacttcccaaggaccccttttcctctctatctacctaaaacaatttctcaataactcctaccacacagtcatactccagctctaacatcccttcccagccaagggtgcagggctctggcgagaggcaggctgtgacagccctgaccgcatgcccttcctcctgcagctcttccctcctccccgtccccaggcccaacccagctctctcatcccacctcccctacccacccccagcccatggttggtagccatggtgccctggccaggctgctccttactttcccatccaggtggcatggctggcaggaagcctgggcacaaacagggtcgacttcccagtgtcaacatcgatgacaccatagcagcctggctcagtgacaccgaacgcccagtgaaagaaggactcctgtggcgggaacaagaactattgttagccagtggaacatgaggtgcaaggagggaccggtggctgcatcacagcaccctagagagccagctcagaccgacagcctcctgtaactgaccccagccccagacatcccttcccctcagcactcgactccccagctcatcctcccgtagtttggcagggggcagcctggcagctcctctaccctgctgggagccctccctgatgctgtgtcaggcatgtgcctgagtccacctgtatccccacccccgggcccacaacagggcgtccagcagcaccacacgtccagctcaaccctgcctctctgccacgtgcaggcaggcaagacgccccccggattctgacgcccaggccggatatctgcacagaaatggattcctccatttaagacttcttacttccctctcccacccccgggacggctgatgacttcagtgtttagggatgaatgctgcgctaaaaggacgtcataaaggtatggtggaggaggatctcttccaaaattagccttgcataccatcagaaagggagccaacagctgaatttaggaaatcggtttttaagccgcagagtatttaaacctggagaagcatcaagactagccagagaaaacttatttagacctccatgtttctcacagccatgggattgcaggcttgcagctgcgcgaacaatggagtggagagacgggacccttcaggcaggaggtgcttttagtaaagaaaaaacacagtctgcggtcgctcagcaatgggtctcagcccatctgtggcctgctggggcgacagggtccagctagggaagccacgccttcccatatcctctccacactcagctccccttcgcattcccatctctcctcttgccaggatgctgcatggacacattccctaggctctgcctgccccagagaggttctgaagttcctgctgtggtcaggctccagctctgggcatggcagcggggagaaaacagcactagatttagagttggaagacaaagttctaatcccagctccacctcttggcaagtcatttcccctctgagcctcagttttctcatctgcaaaatgggtataatgctaagatgtgtgaaagtgggcccagctcagagcctcacagtcttcctgggtgggtgtcctcatgttcctgtgcctggggactgagtgctgccagtgactctcagccatggccaccatggccaggctggtttcctgcagctgggccacccgctgccccacatcttcaagttctacatcttcaaggagcccctggaccacttcccaggcgaggaaacagaggctcagggagggccacaaggggcagcactggccaagctggggcctccaactcctgctcaggacagcagcaccatcacacacctgctcacttgtggccaagcggggaggctcacctggcggaagaggaccccggtgtcggtgcagtagcgctgagtctcctccccgccctgcaggaccacgatggagccggcctgcacagcagggttcttccgcagccgctcacacaggcgctgccggttcaaggcaaagagcgccagcggcaccttcagggtttcattccccagccaaaacgagggtctgcagaggcaagagcacacaccgccacacaggcctctgttagcatctccaagcatgcccacacctgaggtcggggtgaccggaggcccgagcctgccgtgggacccccatcagcacggggcaagctgcccaagctccacctacttatgacccagaaacagcccctcactgatccccctgaggaccacaggggcttgtctcccctccaccacccatgctgtcctgactccacccccctgctcctctgccccccaaccaactgcacagcaggccacagtgaccccacgctcccgaatctgcagcaggtccccagtcctcactggccacttggtgcccatgaccctgggggccactctctctgcggaaaccttctccaacagcagccggtccaggctccctaccaggcaggcccctggctcccggctcaacctccctgctagaggccagcttggcccaaccctggggcctcttccctaactggctccctccctcagctcagctgagcttacccagtccttcagctcaaaggaccatctgcatctgcagactgatgatgtccagctccagactcacagacccatcagccaccctcagcaggcagaagatgcacctgaaccaaagtcgctcctccccagcctcccccgacacaaagcacctgcacctggacagtcccaaaggccatcctggcctcctatctcatcccacctcctggccaccagcaaggtctaccctcattgcacatccccatccccagggccacctccccatgtcccgtctggacaactgcaggcaactctcaacggtgctcttggccgcaacttccccgtggcctggtctgcaccttctgccagaagggccctttcaaaatgccaatcccagcacacactccctgcccaaccccgtgccagctggcttctctgagtgcagacttcactccccagccacaagggatccagacccccagttcacccttggcttcctctactgtggcacgggcatcctcgctcttccctaaacccccagaacactccagcctttgccgctgcggcgccctgtggggaatgctcttcccaagggcatcccatgcccttttacccagcctctgcagaaatgcccctttcctacccaccccagcctctgcagaaatgcccctttcctacccaccccatcccccagctctcttcgtgtctctctagagcccccatcactcttcatttatttgtttgctggccctccaggtaacatgtaagctccctgagggcagggacagagcaggtgtcggtatctatggaatgaatgaaaaaacggatggtggtcccagcaagcaggctggaggccgggtgtggagagataatggggatgaggtggaggaggagtaagcaggggcagggtgtgcaggagggagcccctgcggctctccagccagggggcagtgggtgggcacggaggtcaaggaggcagggacatcccagagctggtgcgagcagagagctctgcctggggactgcagtgaagctgtggatgaaacctgccctcacagcacagcacggtgaagtggtctggggcacctcacactcacctcacatgggaccctcagaggccctgaccctcctgccagggtcacatgagcaggtcacacctcctgcacatcttggctccaatacgaccttttccggatggtcttccccggcctccctctttgaacctgcagctcttctccttgcccaatcccctactagtccctggcctgaggtttccccacttgccctccagatacacccccctgcactgtgcccagaggccaacctacccgacctcctcagcatgcacgctgcctcctgtctccaggcgcactgagccaacgacaggcacatgaggctggggtcaggaggagagggaggaagacagtggatccactcccctggctccctccctggggaccctggaactaaatggctgggggcacccctccatccagggccgctgctctgatgacagcgccctgccccacagcacagcccctgctgggtttctgaccaggttccccactcttctttccactgtcttcctccctctcctcctgcccctagcctcatgtgcctgccttcccttaacgttcgcacagctctgtgtatcgtcccctctctcaactctccttagtggccccctggagtaaactcctaacgtggggccaggtccctggctaacacaacacttagcacacagcaccttccaacctaaacgcagcgggtgctgcctggtgcttcctggtgttctccggcccgccgcctcgggtggaaacactgggagatggagctccaggttgcctcggtcactgccgtgccctcgcctggtgccttgcctgacacacagcaaacgctcaacacatatctgctgaatgacacacggggccacacacacagctgtgggatgagaagatgccacatcagccgcagcagggcaggaagcagccctggagtcccagcctgcccaggaagggtggagggtcagaagcagccgcacatgctgacatgactagagccccgcccgctcccccacgtgcccttcctaccctcccaggagggtgagcaggtggctgggtggacaccagcggccagagcttcctctgggctggggctgcttttctgccacgctcagccattgggatgaaagggcagagggaagtcggtgagagttcgtaaacatgaccacatcccagatggccatgctgtcaggagctaaaagtgcagtcaccagcaccttgtgctcggatatcccccatggcctcccacgccctttcccttcactcaggaaagcccatggtgggatgggcacagaggcaaaactcgtctctgcagaatccccaacagcttaggggcaatgacaccgagaccctgctatggacagcctcagccacagtcgtcgaatagcatgaccggccgaaaatgcccatcctcagccaccagcctgcatagcccagcccagcccacctctcccacactcccctctccctgcctggccacactccttaatcataacaggtgctggctccccatggcctgacaccatgcccccacctgtaatgctcacagaagggctggccttccccttgttcagaaccttctgagagacaaatttctcagggcacccagactgggatcccaagggctgagcagaaaacttgataagccaccttctccttgaacactcagctgccactgcaaagaaaatctacaaccatgcttatttctccatggggctccgccagaacagaacccaccctgtgcagggctctgagcataagaagggctagcctgagccacgaggcaaggcaatatgctacagtcattaattacaggacaccaagtaataaagttttatagagacatgccctttgatttcccatggcataaaccaagcccccagagagactgtcaggctcagagtcaacacagacgaattcttcctgcaaattcggcaaatgtagcaccaacaaaacatctctaacaggtttctgctgcagcttttgttaactggcacccagaatttaaaaggcaaaagccattatcatccccaggtcccagggtaaataagccatgctttgctgcagacagacaaggcacaagagctccagggcctcagagacccacagaacaagtctctgagccccagaggccaggacccccgctgccctggaaacaaccaagacccagtaagcagcccaggaccaagaacggagtgaccaagactgaggccagtcctcaaggagggtatgatgccactgcccccacaagccgtctctgtctccacacaacccacacccccgtatcagtactgggacaccctctcctcaacagccacgtgcagggctcttacctaaggcctagggacccccaaggattcatcctcaaattcaggggctccatctactagatgggaaaaagctgtacctttattttctctaacctccaattcgaatttacattttcttcagttattaacataagcaacaaactactcagtgtcagcaatgcatgttaatctgtcaccaacaaaaatcaaaggtattttaataccatgttattgctcttccagtatctcaaaatatcacttttgctccccacaacttcaaagttaaagtagttgggccaggcgcagtggctcatgcctatcatcccagcactgcgggaggcaggaattcgagaccagaatgggcaacatggcaaaacccccatctctaccgaaaacacaaaaattagtcaggaatggtggcttgtgcatgtggtcccagctacccgggaggctaaggcaggaggaacgcttgagcactggaggcggagactacagtgagctgagatcgcaacactacactccagcctgggggacagggcgagaccctgtctcaaatttatgtaacattttgatacctgtatttccatataattgggttttacttttgtaatattatgtacttatttcatacatttaaaaacattatgccagccaggtgtggtggctcatgcctataatcccaacattttaggaggccgacatgggcagatcacctgaggtcaggagttcgataccacctggccaacatggtgagcccctgtgtctactaaaaatacaaaaattagctgggcatagtggcacacacctataatcccagccactcgggaggctgaggcaggaaaatcacttgaatctgggaggcggaggttgcagtgagccaagatcaagccaccgcactccagcctgggtgaaagagcaagactccgtttcaaaaaaaacaaaaaacaaaaaacaaaaaaaaacctgatgccgagaatggtacgtaggtttcactgatgcccgtggggtctaccgcacagacaaggaaagatctctgcactagaatgtggagccactggccaggtgcggtggctcacgcctgtaataccagcacttggggaggctgaagtgggtgggtcacgaggtcaggagtttgagaccagcctggccaacataatgaaaccccatccctattaaaaatacaaaaaaattagccaggcatggtagtgggcacctgtaatcccagctactcgggaggctgaggcaggagaaccacttgaacccgggaggcggaggttgcagtgagccgagatcgcgccattgcactccagtgtgagactccctctcaaaaaaaaaaaaaaaatgaaatgtggagccacttctagacagggtcacaccgctaagttcccagtaggagaggccagccaaggaccagccacctcctcccctcagcctccagcgtggggccaggcaccagacagatgctcaggcagcccactgggcaccagaccgtaagcgccaggctggagagggttgccacggcggaacaggacctcgaggcaactggccagcaacctccaccttgcacctctgtctcctggggcggataggggtgccaagcatacacagaaaccaagagacagctgtgtggagtcaggacctggggaagagccagggaaggcacagggatactcagtggccagcctgcctcccataggcccacccgtccctagcccccagtcggcctgagtcttctgctcctggagcacaaggttcacattgtggggttgggctcttgacccagaatgtgaattctgcagaagactctccagaagaatgctgactccagtgtaacctacggctcaacaggggtacacgtccagggcagttcacctttgcctctttttggctctgcaacagctcctgggagccactcagttaaagaattaaggctatttcttcatcctacccctcggaattctgtccccattccccaccatgactccttccctcaatcactgggagtctcccaggaaagcaggatgggatgctggactaatttagagtaaatccccttttcattcatttcaccaagcaccaatcacagggcagccacagactggccctgcggatacaaaagaaccccaggggttctaaggatgctaggagaggcatgaagggaagcaactcctaacccacaatgggcagacgtgtaaaagtgtactgctggggagaaaactgagtgttctggagttctgagcactaaacctttacccgagggctgggaaaggcttctgggaaagggaaccatctgagctgggcctgcaaatacgtgaagaatcatatagaggacaagaacattccagggctagttgggtgagtgtgcaagggaagaagggaatggaaaaagccatgtgggagagcagatgcagacaggtctggctggagctgacagatttcaaattatcaatcctgtctgtggaaagctcaaagcattgcttaaggagacagcagcagtgccaccaagtgccatgggatagggacccctctccatgaggggatgggaggtgacctcagcgcactctgtctcaacctgaagcctacacccaggctagcaagagaaagtaggatcaaccctgaaacaccccacatcttaaaaagagagatgcattcagagtagattcttgagtttcaaattaaatctgagatgctagtttagggcttcccctactccccaaatcatatggggcacaccccagtcacctggaactctcatggaccccctctgtcccaggctctggtaggattctacagacaaccaaacccaactcccagtgagcccacggcaatggccgtgacttgctggcatcatgcctcgttatgcctgactctatgatctgttctgtgagtgtggctaggagctgagctttgcgggaaacacacttaatcattctgctctaaaggaagccactggggtcaacctcaggctcaaagtacatgggaaagccccataccagactgggatggctcttcccaaggagactgccaggctctggaagctcccacaccctctcaatagcagacctctctaagacctgccactctgttttgcctccctcacccaccctgtgtggtggcccagagaatcggttctgctagaaaagctctcattctggggccaggcgtggtggctcacacctgtaatcctagcactttgggaggcggaggcgggtggatcacctgaggtcaggagttcgagaccagtctggccaacatggtgaaaccccatctccactaaaaatacaaaaaattagctgagtgtggtggcacacgcctgtaattccagctactcaggaggctgaggcagaagactcgcttgaacctgggaggtggaggttgcagtgagccatcatgccattgcactccagactgggcaacaagagcaaaactacgtctcaaaaaaaaaaaaagaaagagaaaaagaaaagctctcattccaggatccagtcagttccagacttgctcccgtccagacatcagcttggttccttcaggagagcagcaggtctcaggccagcttggaatcctgaacccaaatgcaacccctggcactccctgtgagcaccgagccagcctaaccagagagacagcacacccacagctgggcaccagcctgctcagtctaccctttaaaagggtcacaggctggattcaaggatctgaccctgagttccttgacacccatctgagactttgtctgcactgttctctacctgaagggagtctcattgctgaaggactagcacaaaagtcacccaggaagtgaagccttcccacactttatctgagctcagagtccatgcccctcctttgcaaatggcaagaccacacggcaagcagatggatgacagagtcccatgtgtccatctgttccagtggcctgtgagtaccttaagggaagacccactgctattcctggaatatagcaggtgcccacaaaatatttgatttgtatgctctaagctccctcaaccttgggggccaacttagaacccactttctgttgccattttccctgtatcttaaaaagagagatgcattcagtccactagatcccccattctgacctcagtttccaacctggcatctggaatactgctccctcctacaccatgccccctctaccccactgtaccaccagacccacaccttctcccattgaactcacacatagctcaggggagcctaatctttaaaaaacagatcaagcagcttgtaacaaaacccttccagcccatcagggcaaagtctgaagccgccacctggaacaccacaccttccaaccagccccaggcatgcacccctgtccccagaacactctgaactctcaacctttgtcccttaccctgggctcagatgctccctatctgggagattccgcccaacgctctggtgaacccatctgtccacccttcctcccactacgaccactcagctttctttcatttagcccagtatggagcacctactgtgtgcaaggcaccgggctactgagaagcaggtaacatacctgcccttgcactctaaatgcagagaagataaagaacaagtacaaacaatgctctatatagtttatcaggtgatgatgagggcacaaaaagtgggatagatggttagagaaggattccctgagggggtgacatttggcccctgaaagaaatggggaagtgccctgctgggaaaagggaattccaagtccgtctcgaataccgcctcctccgggaagcgcccgggtccctggggtcctcgcaacgccgccctcctacccgggggtcttggcagcgaacatgcgtgtcgaccccagcccccaccgcagccgcacacggtggggccgccagacgcgggcaggtggggccggagccagccaggagggtggagaggagctgcggcccccgcgctgaccctgactcggagcgtgcagctcgccgaccggcgctgggactccgggccaacgggaagaggcgcctacccgcggcattcagcgaccccggctgacgctctcacccgcggtccggccgggacacccatgcccctctccacgccagcgggaaagagcgagggaggcgcagcactcacccggtggccgccgccatgttcgcccggcaccggcgtcacgtgaagtgcggcgtcagctgagcccctccgggtgccaatgcatggggcggggtaagggcggggcagggggcggggcatggagtccttgacccacctcctccagagccaaattccacgggacgggaaggggcggtacctggggaagggcggagccccgatggggcggggctcccggagattgggggcccaagagctcggccaggataaatgagcgggctgccggctgcagacagtaggtcgggttagcgggcagcatctgcagccttttcgtggtgggagggaggtcctgaagcagaggacatcttgattctggttcagtccccgatctggcgtaccagcccacccgggagaagaacacataggaataaagaaaccacgtgggaggagaggagggagactgacccaggctagggtcggggcagaggtggcgatttttgtttaagaagggaaagggcttgagcaaaggccgtggggcaactggaggactctaaatgtgcagcgtccaggagaatgtgcgcgagagaggggcagcctaagggaagcaagggccagaccctgcggggcctccactgtggggcctatgagttaagtctggtaggatcttttctaggtttcctgggctgcagaatggagaagctggaggaagggaagccagggaggagggcaggcgagaagtgggcacagccgagaagggtttaggagggagagtctgccagaaggcttactcctctgccccactgggcactggtactgggtgcagagtcctgcagagaaggtgtagggaccctgcagcagacgctgccctccctactgccaacagagtcagggcattacaagcacggcccaaatgcgttgcacatgtgagctcatagaaacctcaccacagccctatgaggtcgagactatctttaagtctattatacagatgaggaaactgaggccagagagtgctcacacagaggctgagctcatgaagccataccctgaggagtgacctcactgcccctgtgaaggaagggggccccacactgttgggggagggcgtccctggcgccaagggtgtacagatgtgtgtggtgtacagatgtgtgtggacaggtggatgggtggcccaggataggcgtgtggggctcctgaccccaccctgcagctgtcccacagctggaagtggcttctgatcaaaggttgtgggttgggggatgcttcttgtttctttatcgaaacaaggatgtgggtcaccatggccaggctggtgggagccaggggctatgactggagaagcagcttctgtttgtccccatgaagcagggaggagaataggccccttaaataggagcaagggagccagccataagcagggtagtgaagggcacgtggcacagttacctggaagcccagtaccatccctgctgtcctcatctgtcaggagagagctaatggggccacctcacagggctgctagagggttttacactcaaacctgcaggcacagccagagaccaaagctgccaggaggaatgtggcccctccagacagcccctcccacctcccggtcccagataaggaaaacgagagctaatggaagagggggggcctcatcccttctaccccttcccacaacacatggacaatttgcaggggtccctgacctccaggcaaggtccaagaggagctctctccaccctcttgccagtttccaggaagaagaacagaggtaaggattcacaccccactgcctggcctaggggcccctgagaacttctaacacccctagttaagcagtaggtccgccttcagcttaagaaactcaactccctagtaagtggcgctttaaaaaatacataataacaaagggtgagcagaatgagctttccatgcgccttcaaggaaggaaaacataccccccagctcattcattgcacctgcctcccaccatttcttttgacataaaatatgtcaaaattaagccagctgccagctctgagtgcttactaatatgaaaaagaagtcaatatcccaaacacaaaataatggaaggaaggcacccaccaactgagtggagctcccttgtttgtggacagtaatatggaggcactgcccatgacccctgcccacccaggtcccctgccctctcccctccccatcaggggctccggcagggctgcccctcacccctcacccctccccatcagaggctgtggcaggggctccagaagccgcccagaatatgggagaagaccatttagttacttatgcagggcagacccaggacgttgctggagccaggaggcaattgggggaagattgattttagagagtcgaagtgggagtgtgtaaatcagccaaggcagcgcgccaggcagcactctcatgcggcattgcctccgaggtcacaggcccttgtggccgaaacagtctcctctcgtcaagccctgcaggtggctggtagatgtctgcactcggtcagcctggtagcccggtagccagcatagcattattctccagaagggcccccccaactcccgtcaggccttgcaaaagaagcttcaccctgggaagacacctcttgtgtcccgggacactgtgtccagccaggtttccctcctccacccattccccacaatctagcccccactcttgcaactccgtggacgctgctgacagctggctgcctggagacggcaggcccagatgtggcggcctgctaggctctgactcatgagccacccttgggccatgaaggggaggtccccgggaagagccctgtccatcttctgctgtggattgagggcactggtctaccagaggctctgtgggactgcactggaggtagcctggatgctggttctgccctgcaccacccagttgttgcccacagtgccactccaggactggccatgctgtgagggccagggatccagaccctgcccttgcctagaggatctttggtctggggacagaggtagaggagccctccacactgtccctggggagtccaccatctgggagggcctcagaacggggcttcgagggttctgcttttggctaatggggagatcctgggggattctgagctgcaagctgccgatccaaacccctctctccagcaggagctcaggaggattagcagagagaactgaaaagagccaataagagccaataaagccactgcacggggccgccagcctcagatggtcaaagccctacacaagatggcatttgggtgttttgcgattgtttgcttttgctgagaatagaagactggatgcagaaagccagcaccaaataaacagaagaggaagaatagaggggactgtgggtgtgagataggggcagggtggcatatggcaacccagtgtcttcccaagtgggaaagcaaggagcgtgatgggtgtggaatgcccaggagaccgtctctctatcctggttctggcagatcccagccttgggcctttgcagggcctgcagaggtagccacagctctcccactccaaaggcctgtgtggcctgctccttcctccaggcctacaccccagctgtcaccaccatccatcaacccccctcctcacaggagcccccacatcacgttctactcctcctctcctttctcccccagcccagcccacctgggcatctatcttcctgtagaaaagaggcaggcagagctgaggggccttcccaaggaagcccccatcaccgcctcagatgaagtggtccctgctgaatgctttgctggggtctacgaggcaattcaagatgagaaatggaacggtggcttcggaaaagcaaatcattccaacagcacctgaaaacatcgaaggaaacaagctctttttgtgtgtgtggaaatggggaatatattgtttctcactgtttcgaagactgttttcccatcttgaaatcacaagctgttttcttccagagagacttataaatacatccaattatcgacattcaatataagaaataaagttctgaaatggttttcttcagcacatgcagagtgagccgaccaggttgggcaggtgataattacttttatttcttacgagtgggtatcaccgcggagtggctagaagcttcaccttttattgccttcaccttttattacatttcccacgttgtgcagggctattcattggtaattttattatcccatatcaagatcttgattaaaaaaaaggatgaaatttctaatttcaaaagatatgagtgcaaagtcccagagtaggaggatttggtcctataccttgtgacctgaagagtaaccctccagggggatggactgtccttgtgcccagctccaagtgactgaatgtcactgactagacagtgggtgtctgctggcattcacaattgttcctttttttttttaaatagagatggggccttgctttgtcacccaggctggagtgcagtagtgtgatcatagctcactgcagcctcaaactcctgggctcaagcaatcctcccgcctcagcctcctgagtagctaggactacaggtgtgcccccccaacgcctagttaattatttttaattttgtatgttttgtagagatggggtcttactatgttacccaggcttgtctcaaacttctggcctcaaggcatcctcctgcctcagtctcccaaagctcaggattgcaaggcatgagccactgagcctggcctcaactgttccttttagggactctgctcagggtgtcattttaagaaggatgcttgtcattttaggatggtgtcatttcttttcttttcttttctttttattttttttttttttgagatggagttttgctcttattacccaggctggagtgcgatggtacaatctcggctcaccacaacttctgcctcctgggtttaagcaattctcctgcctcagcctccggagtggctgggattacaagtgcccgcccccacacctggctaattttttgtatttttagtagagacggggttttgccatgttggccaggctggtctcaaactcctgacctcaggtgatccacctgcctcggcctcccaaagtactgggattacaggcgtgagccactgcacctggccaggatggtgtcattttaagaagcatttcatgaaagcacctgccggtccttctgtccatgccaccatcaagatgagatcacctgtgtctcctcccgctccatccactgggattgctcctgaccccacccctgtctgcacttcctcctcaatgtcttgtctctcctccagcctcttccttcccgtggctcttttgctgctcacctgcataactacttggctgcagtcccttctcattctgagccccgactcgtcaagatttttctgtagcaagcagctcctgagtctcacctcaagtagaagagggatacattcaaatgctgtccagttgcacagttgcaggagagacagactcagaaaacaggcagaggcagggaggctggcagctgagtgcaccaccaggctacccccaggacatggcagctggcacagctgctcagacccttgccatcactctgcccttgggcgtaactgggactgatacagtgtcctggcttcaccccctgcatgctcaaagcgcttgatgggcagtacagccagttgcagtgcccaagtctcatgcccacaccttggctatcatgtcccttttggcttctgctgggggtggggatgtgtgtatatggggtgagatgaggtgggggtagatacacaaaacctacccccacaagtaaaaccttgaaaagtttagcttggataaaagcctgaatatttcaatcagaatgtctagaatgcagctattttcgttttagcataagtgtgaatttcttgtttgatggtttggtataatttaaatttttgatttacatgccgggggacaggatacacaattgtctttctttttttgagtgatggggggacagggtctccttctgtcgcccaggctgtagtgcaatgccaccattatagctcaaccttaaactgctgggctcaagcgatccttcagcctcagcctcctgagtagctgggaccacaggcgtgtgccgccatcccagcttatttccagtgtcttggctctggagctcttacctagctctgcctccatgtcattgccaaataaatatccctgagcacaaaatgctcgaatagaaactgtgtgatggagaaagaagtgcatggacttcaaagccagaagcctgggcttgactcctggcagcttgacgtctctggtcctcgctttccccgtttggagatgaagatgggatgggctttacctccctgacagggcagttccaaggggtcagatgaccccttgaacactaaggcccttgggggcagtttaacatgatgcaaatgtggtggtagttactttccttattgatacttactgctctttttttgtttttgagacagggtcttgcactgtcccccaggctgtagtgcagtggcacaatcattgctcactgcagcctcgacctcctgggctcaagcaatcctcccacctcagcctcccaagtagctgggactacaggtgtgcatcaccacccccagctaatgtaaaacatgttttctgtagacatggggtctcacggtgttgcccaggctggtctcaaactcctgggctcaagcaatctttctacctcagcctccaaagtgctgggattacaggcatgagccatcattcctagcagtacttattattagagaacctggacacagtggttaggaattggatgtaggaagctaggtccgattcctggcactgctatttacttgctgtgtggcatagggaaaataacccaacctctctgagcctcagcatcctcattggtaaaatggggacgatgggtcccagctgggaggattgttgagaggattagatgaatgtcacaggagacactcagctcagcccctggctcatgggggtgctatccttatttcagtggtcatgtgaggggtaggggcagtgaggagagacaagcatccttatctcccaggtgtgaaggtgggggagatgacctgtgaggtcactgtagccctgctcagctacagagcgaccttgaccgaaggagtgagtccataaccccaagcccagggggccagtgcttagcccctttgagaggactggctgggacctggggttgccacaccacctcaagcaagcaggctggcagtccagccaaacacagcagtgctaaagggaaagagaggaacaagggtgagcaggaagtcttccagggtaggggagatgcttcctcgctacacccagggcctctggtccagtccggggcttcagccacagggctctgcttgtgcgcatggatttgcatgtaaggaagagatagcctgcaaggaggtttgtaagaggaattagagacatgtaatagattgcagaattgacctcaaattcttctacgtgctgcgtccacaacccgcttttgtgatgttcaacccctcccatctagaggtagaatctatttcaccagcccttgaatgtggcggccacgtgacttactttagaaaatgagaaggaaagcttggaaggtgctcctccaccaggctcaccttcttgccattcttggaagccctgctaccatcaccatgggaagatgccctcgccggagggtgagatacctggtcaacagctaaccagcagacacacaggcgtgggcagccttgattatccagcctgaggccaactgctggcccatgagtgagtccagcagagaccagccaagccagcccccgcatcctgagctctctcagggatcgtcttacccattgcatccagcagcgttttagaccatgattataaccaacacagggtggaaggaggagatcctgggactactgccccagagagaaggctgggggagaccctgcagggcctgtgtgcacaaggagctctgcaaaatgcagggtccaagcagcactgctgtgtggccctggagagagagtgtgaccttcacctccccacccccgcctggggcacagcatggcttctgagcagagaaggctgcagggacccgtaatcccagctacatgggaggctgaggctggagaattgcttgaacccaggaggcggaggttgcagtaagccgagactgcgccattgcactccagcctgggcaacaagagcaaaactccatctcaaaagaaaaagaaaaagaaaaagaaaaagaaaagattaataggtacgactgttgtgcctcgttcagagagtcgcacggtctctgaatgagatgccaagttccctgatgccgtgatgaaatgacaggagtctcactcctttccccattctttctggatattcagttcaaacagcttttgggaaaaatcacaattttatttccagatctcagagattgatatcatactatgcattttagggcttgtggggaaatgaaccgaaatcatcctgcagtggtgaggccggggcaggggctctgcacctgcaggtcctccaaagtgatgccatctcagttcccagacgagcccacctgcaggacccactattgcccagcacgaggtcttcctgagctttcctttccaggtgtggccaggcagctgccctcattgctcagagtctcagtaccagccctgttggggcagcagccaggcctttcttcacagggatctgggagcagaagagacctaaaatctccagcaggtgccatctctgcttgaaaggaagaggaggccaaaactgggctgagaaaagctcatgaaattgttacgaatgttccctgaactccaggctggagaattggctgcacagaaaactgtttttagctttggatgtggcaccaaggacagactttgtcccttctgtcatcagtggatgcttgttatgtgaagactaacggcactttctgagggtctccaaatcctctggggacagtccacaaagcagaacgataagtgccaggctcctttgcgggttagggggataggtgggtgggaatgcagcccgcccccagagatgctgatttgctgggcttgagtgcagctcaggctcctggattttgctgttattgtttagagatggggtctcgctctgtcacacaggctagagtgcagtggcatgatcctagctctctgcagcctccaactcctgggctcaagcactcctcccacctcagcctcccaagtagctgagaacactggcacgtgccaccatgcccagccaaatttttaatttttattttttgtagaaatggggtcttgctatattgcccagggtgcaggctgatctcgaattcctaggctcaagccatcctcctgccttggcctctcaaagcactgggattactggtgtgagccaccttgcccagcccaggcacctggatttttaaccaacactccagctgcctgtggtttgtagccaggtttggagttcgttgtctgggcagccacgtaaggaagcagcctctcttgtgcctggaggtcaggctggccctactggctgcctctcctgagatgaagcttggccactgggcatccatttcccagcctggtttattccctctcttcccccagtgagggcccatcaagccctctgataccgactccttctgccctccccacagctcgggcaggaaagctcactggcctggccaggggactcatgggatctacaggggctccctactcccacccaagcctggcaccaagtacaagcttgctgagatcaaatgttgtagcgttgtgtggagagaaatggaaacagctactttggaaggtgctttggcaatatgtgtaagaaagaaaagaaaaggaaaagaaggaaggggccgggcacggtagctcacgcctgtaattccagcacttcgggaggccaaggcagggggatcacctgaggtcaggagttcgagaccagccttgccaacatggtgaaaccccatctctactaaaaatacaaaaattagccgggcctgatggcacatgcctgtaatccaagctacttgggaggctgaggaaggagaattgcttgaacccaggaggccgaggttgtagtgagccaaggttgcgccactgcactccagcctgggtgacagagcgagactccatctcaaaaaaaaaaaaaaaaaaaaagaaaagaaaagaaatagaaaaaggggttaattactactgactttacagaaataaaaatgattataaaggaatattataaataacatatagcaacaaattggataacctatttgaaacaaacaagaaataaccataaaaatgggcaaccagcagccattcttttttttttttttttttttagacggagtcctgctctgtcccccaggctggagttgcagtggcaaaatcttggctcactgcagtctgtgcctcccggttcacaccattttcctgcctcagcctcctgagcagctgggactacaggtgcccaccaccatgcccggctactttttttgtatttttagtagagacggagtttcaccgtgttagccatgatggtcttgatctcctgacctcgtgatccgcccgcctcagcctcccaaagtgctgggattacaggcgtgagccactgtgcctggcccaggaatagccattcttttattcctctactttctttctttcttttttttaaatcgaaactattttttattaaaggaaggtgcatttagattaaaaaaaaatttttttattcctctactttcttaataaacttgctttcacagtgctctgtggactcaccctgaattctttcttgtgggagatccaagaaccctttcttggggtctggatccagaccgctttctggtaaccaccatgggtcctggagtctgtggaacctgttcccagacacccctacctcacccccacccagcccatcaccactgctgtcctgtcccagcttctggttgcagagtgacacggtaaactgtctggggaggggaggttggttgctttgtgttttgcaggaaaaggcctggttgtgatttataagaatcacagacagagctctccaggggtgggaccaaggggacacttggggtctgtgaggaccaggggctgccatggctgatgggagttcagaccccgcgtgccgcgccccaattccccaccctggccccaccacccctgcctgcctcactccaaccccaccatccaaactccatctcttcctgctactgaccccatcttccaacctccacctcctggccccagagcccctatgctcaaccccagcttgaccccggagccccacctccaccacaccaaccactacctctgactctcatccccctgcctctccccctgccctgccccttgcttcccaccccagggtctgctagctcctcccacctcatctgctcagctctggagagaattgggaacccatcctttggtgaggtggctgctggtgagaaagaaaatggtatttgaggcttttactcatcaaggaagggaatatccccctccccctcccaggacttgcaaggcagcgcccagccccctcctccttcctggtttccagcctcctgtgtggtttccatggattcagagatttccttccagcacctgagccccgaagtgagggggaggggagggaggggaagggcccagccatctaggggagggtggtggagaagctgctccaggacggaccccacaggtccgctggccccgtcccctgctcccagagaccctgaggctgggcaccagaggacttgctggggactcgctgggggcctgacaaatcccaccctccttctggatggcccaggggaggtcatcccattgggtcatgttgggtgagaagagctgtctcaaatcctgaccctgtccctgaccttgacccctactacatcccaaatcccaagacctggtcccagaatccaagccctgggttctgacattcagtggactgtgaggaggacagttcagggaagggaccaaggacatccctgcatcagcctccatcctgctgagaactcactcgagtcctgtgtttctggggctccagtgctgcctgcatatctgggatcccagagagaaggcgagaagggtttatggtggggagttagtgagcatcaggcacttggggttctccatcctgcccagcatggccccttccagaacaggcacacggtgtttacgacctcctccccctctgccagagtccccactctgccagagtggcaggtggagaagctgtgggcactgtcgtggtggctgcccagaaccccgacaccctttctcttggagggcagctagggtgcaggcccaagcacggccaggcccatgcccctgcccaggcttagctcagccagaaaagattcgtcgtggctgcagcagagcaagaatcagagccggaggctggggcagctgtggtggctgcaagggcagagccagttgcccacagaaaagctcggcccaggtggggttccttccccagcccaggacctcacaggttctaagagctgcccaatatccttccgatggggtccttttctgcatacatttgtctgcgttcatttttattggttgcggttgagagctcatcctggcatgacatttgccagtgggtgggtaggtggtctacactcttggttaggctcttggagaccaactgagatccagagggactactaccatatgaggacccagtggtcctctgccctggcttccagtagaacctgctggagtttatttatttatttatttatttatttatttatttatttatttattgagatagggtcttgctctgttgtccaggctggagtgcaatggcgcaatcatggctcactgcagccttgaactcctgggctgaagccatcctcctgcctcagcctcccaagtagctaggactacaggcatatgccaccatgtccaaccaattattttattttttgtagagatgggggtctcactatgctgcccaggcgggtctcaaactaccaggctcaagctatcctcctgcctcagcctcccaaagtgctgggattatagacttgagccactgcacttgacctcttggagaatctttaaaagcttctagcaggtgaggcacagtggtttgcacctgcaatcccagtactttgggaggccatgggaggaggatgacttgaggacaggagtttgagaccagcctgggcaatatggtgagagctccatctctaaaaaacttttaaataaaacaataaaataaaagctgttagtgcctgaacttcaccccagaccaagtaaaacagaatttctaggcatgggaatttgtggaaactccctcagagttttcatggggaatactgggatttttgacagctccctggttgattctgctggaagccaggaccaagaaagcttcaagacagagtcctccccaacagggacagtaggtgctgggggcaggggagggaaggcagggggagcccctgggcatggcctcctctcttcccaccctgtgcgtgacagctcccccttggtccccatccctctgccttgcgcctgcctcccaaaggctgcccacgggtcctgctcccttttcctctttgtcccttcatcgcacagtccagatcttgcctcagtcttcacagtcagcccagatgactcatgaaacctggaaaggaagccattcatttgcaaccttaaaacagtcctcttctttgacccagaaactccgctcctgggtatacgctcagcagaaatgtgagccgacgtctgctggcagacacaggcgagaggtggctcatagctgcactattcaacatacccccaaactggaaactccccaaatgcccatccacagtaaactggatgaataaagtggtgttttcatccagtgaaattcacatcacaaagaggatggatgtcagaagcacgacactgagtgagatcagctagacacaaaagaatctgtgttgtatgaccccatttatttaaagttaagaagaacacagaagccaggcgcggtggctcatgcctgtaatctcagcattttgggaggccaagacgggcggatcaagaggtcaggagttcgagaccagcctggccaacatggtgaaacgctgtctttactaaaaatacaaaaaattagccaggcgtggtggcacgcacctgtaatcccagctacttgggaggctgaggcaggagaaacacttgaacccaggaggcagaggtttcggtgaatggagatttcaccactgcactgcagcctgggccacagagtgaggctccatttcaaaaaaaaaaaaaaaaaaaagaggaacacaggaaaaactaatctaaactatgggaagtcagagtcatggctcccggcaagcagtgaacggaaagggacacaggagggacttctggggtcagggatggcaggtttaactcgtctgggtggttacaggggcatatttggtttgtgaaaatgtaagaagctgtgtgcttacagctatgcacttttcagtgtgtattattcttaagaaaagctgtcacaattaatctagctgccctcaaggaggacaggggagagaaacgtttgtattcactcttttcaaggcaggaaagaagaaaatgtaacctgttaggtttcctttttttttcctttctttatttctctctgtctctccctttctttctctttctttctttctttttttttctttctttctttcctttcctttctttctttttctttctttttttttttgagatggagtcttgctctgtcgcccaggctggagtgcagtgatgtgatcttggctcactacaacctctgtctcccaggctgaagcgattctcctacttcagcctcctgagtaactgggattacaggcatgcgccaccatccccggctaatttttgtatttttagtagagacggtgtttcaccatgctggccaggttggaggtttccatttttaaaggcagttggacatttatatcctgccagggagttccccctactgctccccaaaagcttccttttactctcacacctggattgcactagactccaaggaaggagaaaacctccacttgggggctgggagacggggacaggaggagcagcagcccagcccagcccacctctttgtccctcagaatccactgaacacctttcagccttgtcccgctgggacggtcaggattttagggctctggggatcacttcttattctattttttttgtggggggtggggcacagaatctcactctgtcatccaggctagagctgaagtgcagtggcgcgatcaattttgtttgttttgtagagatggaggccttgctatgttacctgggctggtcttaaacttctggcctcaaacaaccctcccaccttggcctccccaagtgctgggattatagtcatgtgccactgcaccctgttcacacgtcatttcagatggtaaaaggagccaagaagaaaacagaccaggatgaccaagggactctagagagggtagagatgacactgaagctgagggttgaaagggcctgtctcctcctcctgccaacattggccttggcctcaagtgatccttccacctcggcctcctaaattgctgggattagaggcataagcccccgtgcctggcctcactccctatttttgaaactgtctcttgcttgcctcccaggtgccctccttctcctgactgcccctctggtcagtccttctccagctgctgagactcagcccaacccttgggaagaccctgtcttttccaactgcccatgaggtgcaggcaactccagcagccctagttccagctcagagtcttccctggctccatttctgtattgcccatggcccctctcagttatttccaggtgtattcatccgttctcatgccgctgataaagacataaccgagactgggcaacttaccaaagaaagaggtttattggactcacagttccacatggctggagaggtctaataatcatggtggaagaggaaaggcacgtctcacatggtggcagggaagagaagagagcttatgcagggaaactccccttttcaaaaccatcagatctcatgggactcatttgccatcaagagaacagcgcaggaagacccgtccccataattcaaccacctcccacagggttcctcccacaatacaatgggaattgtgggagttacaattcaagaagaaatttgggtggggacatagccaaaccatatcaccaggcaagacaaagccttaaacaggcacagcttacccaccgccctgctcactgccttggtattccccatctcagaatccacgaggccagctgtccacatcagagactgggtgttgcccactttcaaagatacatccaagccatcaccaaatgctgcccatccttctaaatatttctggaatccctcccctcgcccagccctagtctccctgccctggccaggccccctcttctcccaccccggttatcactagaaccttcaacaagaccctcccggcttctgctcagcagttctttaaatgaaaatgatctggctgggcttggtggctcacacctgtaatcctagctctttgggaggccaaggtgggtggattacctgaggtcaggagtttgagaccagcccagccaacttggcgaaaccctgtctctattgaaaatacaaaaattagccggccgtggtggcacatgcctgtggtcccagctactcgggacgctgaggcaggagaattgtttgaatccaggagatggaggttgcagtgagccgagattgcaccactgcactacagcctgggcaacagagtgagactccatctcaaaaaaagtttttgtttttttttttaaataataaaagcagtgtgatcttctccctcctggctgcttacaaggatgctacattactcttaggccatcggagtgaggcctcaagcccggctgcattttagctatgcctggatcccatccccagccccacctgagcctaactcctgggtgtggggcctcaaacattggtacaacttgaccgtctcctgtggtcagctccagccccatcttcctgtgttctccttaccaggtactgggctcctaggcttctgcacatccaagacgctgtgcccctgcctcaggcgctggtcctccctgccacatcctggctccacctccttcagatatcaacttggcccctttctctccttccctggccacccctgcctcctgcctgcccactgcccttgctgtatgcactcacccgcacctgcgtcatccccatcaacccacactctcctgggaagccctttgacttgtctgtgttcctgtggggagatagctcccaggagagcagggctcaccccagcttccacctgcctggcatggagtacacactcctggacaaagactctctcctcggccacactcaggctcctccaagccttcttcttgatgagggctcaaccttggcctgtaagaattgctgattcggcggggcacggtggcccacgcctgtaatcccagcactttgggaggcagaggcgggcagatcacttgaggtcaggagattgagaccaggctggccaacatggcaaaaccccgtctctactaaaaatacaaaaattccccgggcgtggagctgtgcacctgtagttccggctactcaggaggctgaggtgggagaattgcttgaacccaggaagcagaggttgcagtgggctgagatcatgcctgccactgcacaccagcctgggcgacagagtgagactctctcaaaaacaaaaacaaaaaaagaactgcagactcttagcccatttccatccaccagcacccctgcacccaccaatgcacaccaagagacttggagcaaactctagcctggggtctatcagctgaagactgcattcttgggaagacccagaccctgcttagagaactcaagcctgccaaaaatatttactgtctgttcctgccagcatctgaagatagggccctaatttcaataagcaccagttagcaaactcagatggcttaaccccagtgatcaacctcccctccccaattttctttttctttttctttttttcttttttgagatggaggcttgctcagtcactcaggctggagtgcaatagcgtgatgttggctcactgcaacctccatctaccaggttcgagtgattcttgtgcctcagcctcctaagtagctgggattatgggcacaaacagccacgcccggctaatttttgtatttttagtagagacagggtttcgccatattggtcaggctggtctcgaactcctgaactcaagtgattggcctgcctcagcctcccaaagtgctggaattacaggcgtgagccaccacacccagcccctacccacttcttatttcacctccctgactctgcacaaacccccactggttccacctccacccccttttccctttaaaatgcccagtcaccgctacctgggttagagttgagctgagttctacagtaaagtctctcctactgcagtagttactgactgaatagcatccatctttaccacctctttttttttttttttttttttttgagtcagggtctcactctggaggctgaagtgcagtggcacgatatcagctcactgcagcctcaacctcccgggctcaggcaatcctcccaactcagcctcccaagtacctgggactacaggtatgtgtcaccgtatctggctaattgttttaatcttttgtaggtgaggtctcgctttgttgcccaggctggtctcgaactcctggcctcagcctcccaaaacactgggatgacagacatgagccaccatgcccggtgtctttaccagctttaactagcatctggctttgtgtccctccaacatcctttagcagtggctgaacgcttgtatgacagacaggtggaatgtgaacaacctcattcccacctcccagaggaagatctgaagtcctgtggctgttgcacttggacaagcccacgcaggagggagtggtacccgctgagccaagccccctgctcctaagtgagctttccaggtgtcctgatttcctggggccactgtgatgaatgatcatgcgctgggtggcttaaacaacagaagtgtgttctttcacagtttgggaggccagaagtccaaatcaaggtaacagcaaggtgggttcctcctggagtctcccagggagaatgcatttcctgtctctccagctgctggcaatctttggcattccctggcagcatcactccattccctgcctctgtctttgcatgacgttctcctctgtgtcttccttgtgtctgtcccttaaaaggacactcatcattggatttagcacctgccctaatccaggatgatcgtcatcttgagatcctttacttaattacacctggaaaggttcttattccagataagatcacattgtgaggttccaggtggacgtatcttttatggaccaccatccaatccactacaccagggctcagcggtgggtaccctcccttctttctggcacagatgctggcatcactagcgtgggaaggcagatccatgaggtggggagagctggccagggatggtctcaggagtgtggaggggcctgggatggagaacctgagacccccctgcaacccagcttctggcagacacaccctcctggcctcctccccaaagacaaacactcggtgtaaagagacctgggttcaaggcctggcttcactccttgactcatgtgatctctggcaagcacgtgccctctctgggcagagatgattccccagctcctcacagccctggctctgggactctgagtgggagctgacagcaagagctgtgtgtctgcatctcagagcctggcaccctttacgtatcagagcacagaatgacactgaagaaaggagtgattgagcagtggctgggtgtgccttgggatgtgctgaactgggcatgtggtgggatctgggaagcccctgaattccccagatggtcatatccccactgcagaggtgatgttccctgctgatataccactggtggctcagggttgggccatgcatattctatcactggaggatcaggacatgaggaccagccggggtcaggagtctgcagctgtgcttaggcaggaaggtgaggagaggaccaatatttactcagctccatctcctttcagtctcataatgtgccaacaaaataggtcccattatatgcccagtctatagatgaagacacagaagctcggagaggccgagcaacttgcccgaggtcacatagttcttgaatagggcaggattccaacttggtcaattaggcttcagagttgctccctaacacatcatcttcacccctgaggccaggccagggctctcagtgcccagagtagaacaataaacacatcacacaggcttatcaaccacatcagggaccctgtcattctattctcaaaaaatatttttaaccatggttgcattagggttgtaagattttcagagctctttttctgtttttcaaatgtttgctaatgtgcttatatgatctttatcattaaaaaggtaaacattgaaaaaatcatctactaagtggcttctgtcaagagtgcagctagggtagttgtcattcggaggaggctattccagggacaaaccaacaatttaaaggttttctgctgggtgcagtggcttacacctgtaatcccagcactttgggagaccaaagcgggcagatcacgaggtcaggaacttgaaaccagcctggccaacatggtgaaaccccgtctctactaaaaatacaaaaatcagccaggcgtggtggtaggcgcctgtaatcccagctactcgggaggctgaggcaggagaattgcttgaacccgggaggcagaggttgcagtgagcagaaatcgtgccaatgcactccagcctggcgacagagcgagactctgtctcaataataataataataataacaacaataatgaattatccaagccctgtttcccttgtttctacccagatcaccaaaaagtgtatttctctgctttcacacagagctgtttttaccaaaccatgtcttaacactctgtccttggtttcggctggggatcagtagattaaatgtgcacgtgtagattgtctctttatttcccacaaaactgttctctcaaacaccgcctattgtgtccttcacatttcttgcaaagatccaattgacaaactcccgttagcttcatagccgggagaaatgctctcttgatcaatctgtaagctcccgaagagctcaaagatgtctgttttcacccctgctattttcacagcgcccaataaagtactaggcatttactctgtgctcaaatattgctttttgagtggaaaaaaaaggcgttgattgactcatacagctgagaagtccaaaggaatgtcttgcttgcttcagttacggctggatccaggggtccaaattgtatcttcaggaccctaccctccctcttttggttccgttttcttgtgttactggcttcattcttgggcaggctgactgcctgtagcagccaaaacagccactcacatttcccaaagttccttccacacaccggtttgcaagcctggagaaaagagggcaagcactcagttccccaaagttccagggaagatgcccatcagctggcttgggtctgtgtgcccatcgctgaaccaatcagggtgtctggggggaatgacgtaatttcattggccaggtctgggtcaagtcccactcttgaagccagggggcggagtcagctgcatcccactcaaggacacagcaaggatgggctctattatcagaagaggaggtagagaaaggcaggctgggcaggaagctagagcactgcagtttctgcaacatcccaacctggattcctgattttgccgccatattgataaacggtgcagccaccaactctcccgttcctacagccagaaaattattgattattctttgttctttctttttttcttttcttttcttccttccttccttctttctttctttctttctttctttctttctttctttctttctttctttctttccttccttccttccttccttccttccttccttccttccttccttccttccttctttctttctttctttctttctttctttctttctttcttttttttgtgagacagagtcttgctctgttgcccaggctggagtgcagtggcgtgatctcggctcactgcaacctctgcctcccgggttcaatctattcttctgcttcagcctcccaagtagctgggactacaggtgcgtcccaccatgcccggctaattttttgtatttttagtagagacggggtttcaccatgttaggatggtctcgatttcctgacctcgtgatccacccgcctcggcctcccaaagtgctaggattacaggctgagccaccgcgcccagccttctattaattaattaattaatttatttatttattttgagacggagtctcactctgtcacctgggctggaatgcagtggcgagatctcagctcgctgcaacctccacctcccaggttcaagctattctcctgcctcatcctcccgagtagctgggattacaggcgcctgccactatgcccagctaattttttgtatttttaggagagacagcgtttcactatgttggccaggctgatctcaaactcctgacctcgtgattcacctgcctcagcctcccaaagtgctgggattacaggcgtcagccaccacacctggccaattctttgttctttcctttcactcccttgcaggctggtagaaacttgaggcatgtggctactatgttcagccatcctgcagtccagccccagcctgggagctgctaccccccagcccacatccagctccgagaaccctggaactgagacggcattatacccattttatgggtaaatgtgccaaggccaagctgaactaatgatgtctttcctaagttcacacaggaagctggtggtagaatctgggcagagtctaggtctccaactacttggttcagaaatacacccactcatgccccactctgtatcctatggccctggtgcaccaacagaccatcagcaccaacaagccaagctcccccatccaaccacccacctccagcgcagccagaccccagggttcaaggcttgggggcactgggctccctcagcagatgcatgtgcagggggcaagcctcctgtgtgtagaaggaaactgtgacagcattgaggatatctctccttgggagttcctggcttctggatgcccacgcagctggcaggtgtgtctgagcatgcactagtctctctacaaagcaagaccccgcatgaccaaggcttggaggacctggagccgagaccggttgctgctggggacacatgtgtgtacccttgctcatggaattcctggcactgggacatcatagtctctgatacagaagaaaggaagtgctgtggctcagattccaactcagctcgcacagcgtgggacccccgaaaggcatctggacaagtgcaaggtgcagctccaggcagcgccccctggagttgtccatcccgccccggcatcttcatttatggtatcttgtttcttccttgctacagctcccagaggaaggcatatggtcatctgtgtcagtaggggcccccaggaagcaggtactgagatggggttggagatgcaacaggtttactaggggtaaagtctatggaagataacaggggaggaagtgattgggcagggagagccccagacactaatgaaagctcacaaagtttcagccaacctattggggagctccgcagtagaaagtgcccacaagaggagtccaggttaggcacaaatggccaggtcctgggccccctgccatgcacagtcgctggttgacgaatgcctgggaggagcctggcttcattcagctggaacgctccttgcacctcaacagcaattctagaagggaggcctgagcaccttcatggcagcctcatgatccatttcacagatgcagatgccagagtccagaaatgtcaatgaccctcccaaaggcacatggctggcacatggcagagccaggctggcatgggagcatctgatcccaatgccatgctcctgtcagccccagagtgactcttggctgctaagatgccctttgctactgctgggcaggactctgggacatgtttcccttccatcctccagggacagtgacaaggtggcctgacagagtgcccaggtccctgctgagccccggccaaagctcctgtccctgggaaacatgagtagggacagcccatgtcatgcttcagtctttccaaatctcaggaaactcttgggtagagaagccacttcaatgtggcagcttcaattctggcagggattcatcaaaagtccacagtgtttcccgcaccttccaggtcccctgtctgtctggggtcacccaggaccatctgtctgtcaccacagcggtgtggaatgctgaggatcacctctgtggtgacagacagatggccctgggtgaccccagacagtcgaaaggatgacttacaagtggcccaactggagagattcccatagggctggctgcagtggaaagttgctgccaaatgcccatctcgttccataaccctctcttggtgcagcagcagtgcatacaagtgtcccagagggacaatgacggctgcttcagcttgaatcacaagggaggaggtagggtgctggatacactcaattatcaccccaaaccctatcatcactcataatctgcctgagataaatcacaggcaggtaattattatgtcaggccaggtagcagagaggagttctaaaatagcagtcaaggaacttcctggttaattcaaatccatcctaactccctccaggggacaaaagtgctttggctgtagaattgaccaggcggagagaaatacgattgcttgatgcaaaatgggaactcctggacttaatgtttctctctgtcaagtttcagaatagcacacctgtcagaaaccctaaatcaatgatccaccatccggcgtaaatcatactgcagggatgtcctattttcttggtgtcaaaaccaacctccccagcctgctcgccagaccgtgtccacttctgctcagcccaggcctctggacccaattagtcctgcctgcttggcttcccacacctgtacttcttcccccatccaaatgccaccaaggcccagctcaagccacctggcccccaaaccttctatgcccaggcccatccctggatccagcttaagcgattccacttcctgtccccactgcaaaaggccaatgctgggtttatccatccctgaactggtcacaaccccagatctgtggctctcctagagctgggtctccctgttcttatccttttggcttctggagccagctcttctgctgggcaacagaaactgctttggattcacttaagccagaagagtggaggtgggtttactggaaagatgctgtttgtggggaggtttcttggagtgccaaggagcagaacacccgattcacccgggctgagtagacccctgtccagggcaggctggcctcaggtggggctggattcaggcacaatctctgggctctggctgactctgtggacgactttcctaggctcttcatggtggcagagtggttgcttacacctgtccaagtgcaggtccacttggacatggcagacgattactccaagttgctcagacaaaagccctgggctagggccaggtgcagtggcttagcctttaatcccagcactttgggaggccgaggtgggtggatcatctgaggtcaggagtttgggatcagcctggccaacatggtaaaacccgtttttactaaaaaaaaaacaaaaaacaaaaattagccaggcgtggtggcgggcgctgtagccccagctactcgggaagctgaggcagaagaatcgcttgaactcaggaggtggaggctgcagtgagctgagatcacaccattgcactccagcctgggtgacagagtgagactccatttcaaaaaaaaaaaaaaaagccctgggattagtcttcatgaggcctgactatgtgaccagaggcacatgcccacctcagggccaatcctggtggccacgggagagcagtgttctcatgggcagaggccctgggtcacaggctgctgcccaggtggacggggcagctccacctgcagctcatagactgagaacatgggagtagtgattcccacaggtcaatcagggcaccaacaagaaggaatggatggtgggcagctccagaccaacaaacaccgagaagttggctctctggaccagagagactgctgaacaaaatcagactggcctggaggctggagttttggggttttcctctccctgggactggccatgaataaggcactcaacttcaccacctctggttcctggaagagaaaatccacttggccagttctgaatcacaggtgctgcggccagggcctggccgagtcttgggtacatttccagagaaggcagaaagggctttgagagccaggagacatcctcccagcagctgctaaaatgtggatgtcgctactgtttttgtttttttttttagacggaatcttgctctatcacccaggctagagtgcagtggcgagatcttggctcactgcaacctccgtctcccaggttcgagctaccccagcctcccgaatagctgggattacaggcgcctgccactgcgcccagctaatttttgtatttttagaagagacggggtttcaccatcttggccaggctggtcttgaattcctgaccttgtgatccacccgcctcggcctcccaaagtgctgggattacaggcatgagccactgcaccctgccggatgttgctaccgttgcaacgcaagccaccttaactttttgtttaccccaaattagaaattaaacaattttattttcaatgtcaccagtatgtgatgcaatttcatgatgatggtttatctgagtagaaaattgcccttggtatctattctaccctcctctgctctggaggcctgggtatagctgaagccacagcagggatgggggcaggtagggagtgggagttggcgagttgcccattttctcccttccctggggtcaggaggaaaaaaaatgccattaattttgttgtgatgaaaaccccatctctactaaaaatacaaaaattagccaggtgtggtggcaggtgcctgtaatcccagttacttgggaggctgaggcaggagaatcgtttgaacccgggaggcagaagttgaaacagcgccactgccctccagcctgggcaacagagtgagactccatctcaaaaaaaaaaaaaaaaaaaaaaaaacccacagataaatttggagagaacttgaatctttacaatagcgagtcttctcatctgggaaaggcccatttctctctgatcctccaggatgttctcagctccagcccctctcccccaccatcccaggaatagcagtgaccttttgtacatatgccttagtccctcatcctccagatacatttaagcgctttgtctcaggcctccctgccaagcccacatctgccaccagcctcgtgtcctctcctccccagcctcaaatcctgcgctggctggatttaggaacttgggcggcatgttcctccacacctccaggctgcggttcaccggcacgctcctcctgtctcatccaccagggattcctatctgtcccttacattgtttccctctctgtagagccaagcgggaagggccatgttcacctttcagctcggtgccccacccccatcccccagttgctcactcacatgcacaagttcatcttgctgcaccaatgagtcttctcctccatgctcacccagtcttccttggatccccaggtgtcgtcctgggtgtgtccggtggtgggtgctcagtaaacgcttgctggatggaaggggagacagcaccactgtggggggcggggactgtgtttccaccagccctcggtaggatctttttttttttttttttgagacggagtctcgctttgtcacccatgctggagtgcaatggtacaatctcagctcactgcaacctccgccacccggctccaagcgattctcctgcctcagcctcccgagtagctgggactacaggcgcccaacaccactcccagctaatttttgtattttcagtagagatggggttttgccatgttggccaggctggtctcatactcctggcctcaggtgatctgcccgccttggcctcctaaagtgctgggattacaggcgtaagccaccatgcccagccctggattgagaatgttctaaagacaagagcttttgggaacgctgcagcaggagacttgcaggtgtgcagagggctcttgggggcctcatgagcagctggaggtgacccctctccccacatgtcttaaacaagggtacttggccaagacagtacaactggaaataaagacaacgaaaaacagtccaaagattagaaagcaagagacaatattatcattcttggcagagaatgtttatatttacccagaaagtccaagagaattcattgcaaaacagaactgctaagaaagcctggaaaagtggcctgataaagacccatagcttcctgcatgccagggacgagctgactggaaaataaagtggaaaaggcctcattcacagcatcaataaagtgataaatgacaccagcttaacatgaaataggccagacccatacaaagaaaaagagaaaaccataaaaagggcaaaaagacgtgcctcgttagagagaaatggttcttccccggatgggaaaacccgctagcgtgaagattcaagttctctccaactttacccgtgtttttattgcaattccaatgggaaaataattccaaaaacattttcactggtgtttgccagaaaaatgcttatgttcctcaaaaagaggaggtgcaggctgggcgcggtggctcacgtctgtaatcccagcactacaggaggctgaggcaggtggatcacttgaggccaggctggctagcctggcgaaaccctgtctctactaaaactataaaaattagctgggtgtgttggtgtgtgcctgcagttccagctattcaggagactaaggcaggagaattgcttgaacctgggaggcagaggtttcagtgagccgagatcatgccactgccctccagcccgggcagtagaggaggtgtggtagggctgaggcgcattgccatacccctgtgtgcatgcctgaagggacagggaggggacttcctctccagctgcctagaggaatattgcagccagctctcttagcaaagccacatggtcaccgtgagcttgggaagtgtgggggcacctcctatgtagtactggctctgagaggcttgggccttagtgctgttttcccctagtgggggtccctggacaaatgatgttgccagcagtgtgttccaaaaccaccacggtgggagggatgagcgtctcctgcaggtcatgacactccaggctggaaagcatcagagaacagagcatggctgtgggccctggggaaggggacctgtcttagtctgtgtgggctgctataacaaaatgccttaagctaggtggcttataaacaacagaaatttatttttcacagttctggaggctgggaagtccaagatcaaggcccaggcagattcggtgtctggtgagagcccgttttctggtagaaggtggtgccttatatggtggaaggggccagggagctctttggagcctcttttatatgggcactcatcccattcacctcccacaggcctcatttctaacaccattacattggtgattaggtttcaacatatgaatttggaggggagtgactgaacatccagaccacagcacgatctaattggctgagcccaactcacaaactagacttgcgagatggctgtctgccgaggtctccttggccctgaccgggcagagggggctcagtagggctcttgagggtctcagcattgtgaagagcttggggcagaagggtagggcaagacaggaggatggtgagggcctggctgttggccacagagtgacctctgtccccaccctctcccggggcttcctagggctgggaggcagagcctggagtcttctctggtctgcagctcctttgttgtgtgacctgaactatgcttctgcttggtgtctcagtttccccattggtaactggggcgttgactggatttcagggctcaactgggctccctttctcggcaggtggaaattgccatcttataaaggggaacctggatgctgctggctgggagcactgggtggaccaggccacagccgaaggcccaggagaggtggagagaggctccatcctgagtggggctcttctaggccctagagtctcaggccactcatgccactacagagggagagacaggggctacatagggagggtgtggaccaatgaggggttcagggttcccaatcccacatcacgccttcccgtgaacctggagatctctcctgtcccaacaggcctggaaccagctgttggcatcaaggccttgcacgcatgacccagacagcttcccctctccctccttccagcctgctgcttccatactagattcggggccattttgccgcaggattcatcggagggccgagagggagctgccggcttttccacctccgagccgaggttactctcagattcatgggaagccataaacccgcgccctatttctgctctaattgaagcgatttgtattgtgactaaaataatcagagacaattttattggtatatttttaaaaataattacagcccatatatttatgttatataactgcagtgacaatttgattgggttccccagggccccaacttgaagagcctgtgtgggagtggccccatccctgccttcagcaccctccacctcccccaaatctcgggcagaggtgatgttgacagatgcagtccccaaggcctgaggctcggtcagggacttttcagtgggcatgtcttaaaaattttgggacagccatgccagcccagcgaccccaaagcgccgtagggaggttgggaagagatggaggggggctctggagtctggctcagctctggcctttgtggtgggtgtctgtgccctgccatccagcatgcagtcactgaccttcttctgttcttctctggggacctcctgcctttgtcctcctgcttctgaacagctgactgtcccaaaaactctggggttgaccaatcagagcatcacattctccagccatggtgattggttcagggctaagcacatgacccaatcagagccaatgacattgcacatgccccagatggactcccgaacggttggggatcccgagccgcaggctgccatcttgccccatgtgggcactggagaatggggctagtgtagagaagaccctagaagagagatgtggatgggacagggtccttgtggcatcatttgagattctgaacctggagctggggctgctcccagagtttttggatatatgagccaatacatcccattttggcttaaacctgctgtagctgtaggactgtgaccaagagttctatttctatgagtcccgcaggcttgtttccccacctctaaagggagagagtaatcactcccgtggtctgttatgcctcgtcattatctgtgtatagtagagatatcttggtgtatagcaccaagcacaggacttggacagagttaaccactcaataaacagcagccatggccgtcgtcaggagcattgtggagcactggatgctgtcgctggtataaggtgtgggcagaggagacagggagaggttaccaggcaatgtcccagcccagaaggaggccctgcccccacatgcttataggtggcagaagcacggttcctgctggctcagcaatgcctccttgccttcttccatcagggcccctcctgctcagccagggtcccgtactgtgcccaaaccagttctgcattgttcctccccaaatagctcaggctggaaggaaggagctagggaagtgaggaggggctagggagggggaagagcagcggccatagctccagcacagtaggatctgactatgggcgggagagcctcgatcgcggggtgctctggtgcccaacttggctccttcctcttagcgatcgccccagctctttgctgagctgttggatgcctcagtgttcccaggcaaatccccctggggccctacctttggagctgagctgtgtctggcctgcacatccaccagcaccacaccaacaccgggcactgaagaccaaaagcggatccaaactcccacccgctctgagcaggttttctctcctacggcagccttcacccggaagccacagctgttaaagctgctagcgggtggtgagggccttgtggttctgcacccaagaaagccttctcttcactggcttcaaaccatcttagtcttagatagcagcacgggcctcagggatagcccccaggtctaccttgtgggaatgacaccttccactcctggaggcttgtcccatgagtccactaatagggaaagggctgaaaagagcgctggggctgaaacattcagctggctgttgggtccccaggccctcctgactgcacagtttagtggagacgtgcaaactcgcccagttgcacacactcacatgtacacatatgcacacgcacacacacacgcacactttcacatgggcatgccacacatacacacatatgtgcgtgctcatacccacgcacactctcacatgggcttgtcacacatacacacatgtgcgtgctcacatccacacacactctcacatgtgcacaattgcacacatgcacactctcacaggggcatgttcacacccacgcacactctcacatatgcataattgctcacatcggcatggtcatacacatgcatactcacattgtgtacacttacacacacacacacacacactcctacacatgtccacactctcatgcatgctctcacatgaaccaaaatacttgcctcttctgcctatagcagagcagaggtgcgtccgtcgatgccccatggtgtttctcaggatccacgcatcccatgtactgagtgttgttagccgggagattgcctgctcctgtgtggctgcgctctcaccagtcctgaaggtccttataaacattggtgccacccatcttgtaggacattctctgcccggccccaggagcctcagcagaggtcccctgatttcaaacattcttttctgtcattagagcttatgttccacagatgactttgaaaatcttgccaccttcacaggcccagacatgacggtgcagaggacatcaggaccagcaggacataaaaccctcacggtcacagggagaaagtcagatcccgggcacctgacacagccaagccctgctctcaacatgtgtatgacaatgggtgtgatagaggtgccccctgcctctgggtctgggttacatgcccccttctttgagtcctagagggaacagcctgatagtgggcacaccccttcctctccctgaaatgacctggcagacccccttcccccagtgatggccttagggattcccagccatcacccctccctccaggaacccctcatcccatccttccatagggccaccacacagacaggccctctcgacctttcccaccatgctctgcacaactaggatgggcagtgccccacccaaagcactgcatgccccgctccccattgtcacagtaggtacaggacatgggtctattagatcttagacactacagtccgtacatgccaatccattcccagaagacctcccctccccaccccagtgtcactgagccacttcctccagcacagccccacggagggaggcccttttgtgtcttgcccatcacctggctggccagatctgctcagctcttccctgactcaagaaaaacaagagagcttcattagtccgttttcatgctgctattaaaaactgcctgagactgggtaatttataaaggaaagaggtttaatgactcacagttcagcatggttagggaggcctcaggaaacttacaatcatggcagaaggcaaaggggaagcaagacacctccttcacaaggcagcaggaagaagtgcagagcccaagaggaagagcgccttataaaaccatcaggtctcgtgagaactcactcactatcacgagaacagcatggggaagctgccctcatgattcaattacctccacctggtctctcctgtgacacatggggatataaggattataattcaagatgagacttgggtggggacacaaatcctaaccatatcaagtgctctgtggtcccagataagccaagaaaccttcgtggaggaggccacccccacccttggcctccagacccagtgggatgcctaggtaaggatggaagtgtcccttaagagggctggcatggatgtcacatgttccatggcacaccttgagggtaggcagccttgagcagtgggcggggagctgggcctgcagggacacagagccctgaggtcttgtccttggacccctgatctgggatcctcaggggctctgggagaaagcccctgtcccctgctggtgctggtggtgtggtacagataacctggaaaccctaaaagaagcagggatggagggaaggttgctgagaggtggtcagagaagctgttatgcagactgggggccagggaggtacaaggggagtccagatgggggctgtgggagggacagacagacagcagactgggtcacccccaggctccccttctgggccccccaggaaacgaataggtccagcccaaaaggggctctgggaagactgctcccagcacctctgtgctgccagccctaaaggcacccacccgacccccacacacgctgaatctccactccttgtttgcaggaggaaactgaggcccaggagcctggagatgtgtctgctccaggtcacactgtgggctgtaggggtccggaacccagacatgtggactgcgccaggctctagccaatgactcctccaaaccactgcacctccccagccctccagagttctcatctgaaaaacggggcatcaggtctgaaggtcttcaatgccccttctggctgggatatcagagttttgggacctctctctccaggtcctcatgagtccagcaggagctctggcaggtccagggtcccctccttccctctgctgccactgctcagcacccaaccctttttaaaattagctctgtgagttacagaagtaatccctgctttcttgttaacatgtttcaaacagcacagaagggttcaaggtggaagctgaaggtactccccagtctcccccacaacccccagcccacctctgctaggtcccacatggcctttgggaaacatatgcattgttccctcttcccatagaagccagaagggaagtctggaatcagtgagccaggtacagctctgggcccaggcccagagatcccacactcatgccagcccctacccacgccagccccctccctgtgccagccaccgcccctccatctatgcaggccccctaccaccaagcccatcgataggggctcattattccgtcctgtctccctaggatggggcagagtgacagctgttccgtgtttaattaccgatgggctgaggctatgccaacccatgaataaaattacagttgttctgcaatgcaaatattgcgggcctccgtctgagggtgcgtgcggggctgatcttcattggctgacttttttaatgaaaaaagttttattacattttaaagaacattcataatgatgaaattcacacacctcaagatttatacagcactgcaaacaagtggcaggagaaagggagttatttataacttcaaataggcttctatcctctggttgcattgttgtagggtgcagagcatttttagctgataattgctttaatggtaaatgagaaacttagaaccaaatatcggaagtgcctaaacaaggagaagcctcagctaagatgggggcgagttgaccttatgggtggggagggagaaaagggagctcgctctcgccaaggctcatggggtaagaacacatggcagacgttcagcactggcagaggtttgccatctgcgggtgcccactgggcacaggttcagcttatggagaatgaacttggagacatgacatcctcctgtcggagccgcaaccgcagggctttctcctcccatggtcgctgtgggatttcgttctgtgtggtgtatccatgctttgtgtgactggaaatctcatctgagcacagctggataggtgataatgcaaactttcgattccatcatctaaatccataccgataggaatacagaacatctgatttgatttccccttgtactaagaaaacggagcttcccagggaaggtgggcatttcctgctgaatgggactggaggtggcatttcctttgctaagccttccctgcagatccttccctctggggacgcagctgagctcaagaacagtatagctgagagaagcttctccagctggccctggtccccatctctaaacagaacagaacctgcttcaacttagcaccgtcaacacattcattcgttcattcattttgccgacatgtgtttgttgaaagcttactacaagccaggctcctggcacgttcggatgaggaggatgtagtctgtggcctccaaaagcaactgaacaggcaagacctatacgcagagacaactgagcctcactaaacatcagtgtgacaaggacagtaatggaggtataaatgcccagggacagggacagcagagaagagggcctggctgtgtctgggggtggagaggtcagagaaggggccatgcaagccagccttgaaggatgtagaggagtttggagtgggcacatgcttggcagggcagcagagtgaccatcaaaggcaccctccagcttgaggtctgtgggagggagggggactttgagtgtctggagcacggggtggcgtctatgttggggtgcaattgggatgtggtggagtgtcaggcggaggagcctgaccttcttcctggggcatctctgctgcttggagctggggttcaggggctctggaggccgcacggaatgcttatagatggtgggggcagggagggcgtttgggatagggattgggccagccagtaggcacatgagacagttagaaggagaaatcagtgactcctgcttcccttctcttggaggtcagccaagcctgggtgtctcctgttcattcagcaaaatacctcatcccggaacaagcgtgcaaaaggagacagggcaggattccaaaccagctgcaaggctccctctcggtgtccttccccacttcggcatgtctgtgcgtgcatgctggcttctgtgcatgcatgctggcttctgtgcatgggtttacatgtatgtatgtctctgtatatgtttgtgtgtgtgtacttagtgtgcgctttcatgtgtgttcatgcctgtgcgtgcatgctggcttctgtgcatggatttacatgtgtgtatatctctgtatatgtttgtgtacttcagtgtgtgtgtgcctgtgcatgcttgtgtctgtgctgagtgtacatgtgtctgtttatgtttgtgtatgtgcagatatgtgtgatgtgctcatatctgtgtgagcgtgtgtacatgtccatgtatgtatgtcaagcacaagggtgtgtgcttgtgtgaatgtgcactgatgtatgtgtttaaggatttgtgtgtgtttgtgtttatggatgtttgtgtgtgtgtgagggtgcatgcttattaggggatctgtgcctagaccagatacctgggttttttttgttttattgttttgtttttgagatacagtctcactattgtcacccaggctggagttcaatggtgcaatcatggctcactgcagtctctaactcctgggctcaagcgatcctcccacctcagcctcctgagtagctgagactacagacgtgaactaccatatctggctaatttttaaacttttcatagagaaaggggtctcattatgttgcccaggctggtctcaaactcctggcctcaagcaatcctcccacctcggcctcccaaagtgctggaattacatacaggagtgagccactgcacccagcccagacactgagatttttaaaattagtctgacactctggaacccacacagcctgacaccaccactggagattctaaagtgaatcccgtacaagccacgcacacagcccctgcccttgggtggctcgggtccctgaggtctccttggtgaggggaagaaaacggaagcctaaataacagcagctgccttatggagcagcccaggccaggctcagggggtgtgggggtaagaggatgtctaaggacagccaggctggtcctctgctcacccggagccagaagtgaggtagtgccagccaggcccggggcagcctcaggggccccgaagatgggaagggtgcccagatgcccgtggtatctgggagtgcacatgagtgtgtgtgtacatatatgtgagtgtgcaggtgtgtatatctgtgtcagtgtgaataaacacatctgtgtgtgtatttgtgtgcagataggtatgttggtgtctgtatatgtgcacatgtgactgtgtttcctgacccaggaacaactatctcttgaccaaagttaaccaaagtctcatagaagaggtggggatggggcagggaggacaaggcagacatcccactcctgtccttccccacagtagccctctgacctgccagcgtcagagccattaggaaacaagccatcctaatggctcgagacagtggccagtgggcatcgcgtatactccagggcactctgtgggacgggagttcattgttggcactggaggcctgttttattttttcttttcttttttttttttgaaacagggtctcgctatgttgcccaagctggggtgctgtggcacgatcatggctcactgcagtcttgacctcccaggctgaagaaatcctcccaccttagcctccctggtacctgggactacaggtgcacgtgccaccatgcccagctaatttttatatttttttaagagatggggttttgccatgttgcccaagctagtcttcggcttctgggctcaagcaatccaactgtctcagcctcccaaagtgcagagattacaagtgtgagctgccaagtccagccctgttcccttcttaatggcttacttggggtttcaatgatgacagggtcattactgggtttcaggaaccttccttaagcagctgaaagaatccgttgagctctgcttcctcttccctcttccaggctgaaggagctggaggggcctggggcctcctttggggaggccaggaggatttggtgattaagtgaatggaatatgcccattgtggtaaaaatagcagagctgcggttggtggaggcacagaagcccggccgaagggaccaaggggtgttcgggagggaggaagtccagttctgatgatttattaaggtgtacaaaagaaccttcagaacaaagacccagagatgcaggaaatgttgtccatttttctgcttaggttcaacgacatatggacagccatgtcgaaacagattggacaataagggctgatagactgaatggcaaaacccagccaggcctgtctatctagattcttcttggcctctctaagcagcgttcctttcttctgggtaggcggcaaggccccttctggaatggcgggggtgggggggggggtctcgtgacttacagtcaaacaaggtaggtcagagattgtgcaggtttgttacacaggtatacatgtgccatggtggtttgctgcacttatcaacctgtcatctaggttttaagccctgcttgcattaggtatttgtcctaatgctctctccctccccttgccccccaacccctagacaggacctggtgtgtgttgttcccctccctgtgtctatgtgttctcgttgtgcagctcccacttacgagtgagaacatgcggtgtttggttttctgttcctgtgttagtttgctgaggatgatggtttccagcttcatccatgtccctgcaaaggacataaactcattcttttttatggctgcatcgtattccatggtgtatatgtgccacattttctttatccagcctatcattgatgggcatttgggttggttccacgtctttgctattgtaaatagtgctgcaaaaaacatatgttgtgcatatgtctttataatagaatgatttataatcctttggatatatacccattaatggaattgctggatcaaatggtatttctggttctagatccttgagaaattgtcacactgtcttccactatggttgaactaatttacactcccaccgacaatgtaaaagcattcctgtttctccacagtctcaccagaatctattgtttcctgactttttaataatcaccattctgactggcggttttgatttgcatctctgtaatgatcggctaacaaacatatgaaaaaaagctcatgatcactgatcattagagaatttctttatggccagtttttacacagaaaggcagagggaaagttagagttatatttttaggttttatggctggctttgggggaagagcttcagattctatgaccagccttggggaagagggattctagtttttatggttagcctcaggcaagaatgggactgagagacaggagggcaggagaaggtcagagaaaaacttttgttttggaggctgtttctggggccctcattttggaccgcagcaatagctgggccagagggagagtggcgggggctcagtggtcggactcagagctggcttgtccacctgcagagctcttctccccatagatgccccctacccaggagggcgttgtgagtccatttcacaggccaggaaactgaaactcagagaggttgtgcagctgcctgtggccactcagcaggcaaagccagagctgttgcttgcaccaaggccacctaagcccaaggtgccgcctgccccatgcagctctcctctcctgccactcagcagggaactccagagtccagagatggggaccatccctggggcaggcactgggcagccgcgatgctggaaaatgctcaaggtttcctttcatcacagcccaggccacagcgcctcatttgccaactgtgttctgagaaaacagcaacgatagaaaggcaccagtgaggaggcggctggagctctgggctgtgaggctgcgtttcaggattgagaggctgcgctgggaagaagggcctgccttgggggctgaaggcaaatcctaactcctactgcatgtgatataaagggttacaaaattaagtataaatgcatctctctaaagtcacttttctttctgtgtgtgtatatacgaatatttgtatttatttattattcctaaaaaataattgtatttactgttgtttattgtgttgtatttattattccttgcgttttattgtattgcattttattatttatctattgtgtttattatctattgtatttattattgtatctattatatttattattcctgaaagtttgtacttattatttatatattgtatttattgtttattattgtatttagtatttattattgcattatatttattattatttattgtatttattatttctaaagagtttttaggaaactctgtatttattattcctaagataaagtttattgtatttattattcctaaatatttatacatttataatatttatatattatatattcacatatttgtaatatttatgttagttacattacatataatatttatattatatattacgtatgtataatatgtatattatatatttacatatttataatatgtatattatatatttacatatttatacaatttatatattatgtatttatatattgtatatttatatatttataatatgtaaatatttttatattatatttaggaacaataacattgcacttattattcctgaaaaagtctggggcaagattaatttgataggataaacacaagtactacaatgctgtttttttggcaccccagaactggtaggctgatccaccaatattctttagtcaaagttcttagggccttgaactggaggtaagaggataagcccaaccttaagtctcttgtattttagagcttgccatatatattgctgtgaatacgcaatatgatttaaccatagcatagcaatttaaccaaggaggttgagttgtagcaggaataagagtaataacttttgggccaagcacggtggttcacgcctgtaatcccagcactttgggaggccaaggcgggcagatcacgaggtcaggagttcgagaacagcctggccaacatggcaaaaccccatctctactaaacatacaaaaattcgccgggtatggtggtgggtgtctataatcccagctactcaggaggctgaggcaagagaatcgcttgaaccctggaggcggaggttgcggtgagccgagattgtaccattgcactctagcctgggtgacaagagcaagactgtctcaaaaagaaagaaaggaaaaaaaaaaagaataataacttttggtagagtaaataatgcctaaacctcacttattgatctcctccatgggtcaggcaccccaaggccctcacaagtcttggttgtcttaattaatttaagccacagaacttgaggttggccctgtgatcttctccatgtttagaagaagcagctgagctttctctccaaattccctagagacatgccatcacccttacatgcatacgaaatacttttgtcccttatgaaaatttcactaggaaaaattactcactacgttccttagtcatagatgtgtatgtaaaatgcatttgcggggccagtggtaactgacatagcctgtaacttaccaggtgtgagatgtataaatgaagatggccattgtctgaagtgagaagaatgggataaaaaaaagaaaacaaaaatcggagaagtcctactgaaactcagtgaaagcgtcagctacattttgcaaacttcaaggagtttctgtcaggtgctaggctgctgagaccagagtgaatttttggcttaaagcagacatacagccctctctccaggggaggcagcatggtgtgggaaagaaagtcaaggacacgctagtggaaagtcatgtcctcctctccagggtgagcatgcaggggcggcagccgttggggagatggggccagtgcctgccttgtcttaagggcctgcagacaccccagcttcagatacatgggcacagtcttggctgcacctagaagccctgggatgctgacgtgagcatttcctgggatggaggaactccttcttgaaccccctcaaacttgcagaggtgggctagacatgagtaggctgctcatgagcaccttttgtgtccgggaaccagcagtcatgaggatgctttgttgaccgtgaagacccagtgtttccagcaggcagaattctgtggcctggcctcttctccaatggccccttcaccactgtagtgagctccatctgcccttggggcccccttcctgaacaagagagatgcagctcactcacacagtgggatggggatgccctcaacttgacaggcaaaagcctgggcatgagagtgagctcagctatccagccccctgaagaaaagacagatggagcagaaaaccgtattgtcatgatatcaaggaaagagaaaaaacagaattctaaaaatatttactccaggaaacagatgtaaggttttctttccaaaatgaaaacattgaatctgcaaaccaaatggggaagagaggatgaggacaagctgtggtggaaatggagctggtagtcaggtaaagcatccaaggacacaaacatcacagcaaaatcgcagaagggtcagcgacagggagaatctgtgagaaccctgcagacagtggactcggtgacatggagcataggtttgagaggctttttcagagtgcaccaaaaacaaaacaaaacaaaacaaaacaaacgaacaaaaaaaggaccagagaagttagaagcaataatcggcagagcagcggctttgaagaaaagagattggaaatccaatcaggaggatgggtgttaatgaagaaagaacatgactaacaaggaagaaaaaatattcaaaaataaaagaggaaaacctggctgaactgaagacagatctaaatctgcaggttgaaagggtttgctagagaccaggcaaaactagtaaacatcaaaagatagtggtgacacactaatcgcttggattcatgaggaatgaatacctacaaagacataaacagcaggctgccttggttctctccctgcactccttaccgcctgccctccttggagtagggcctcaccctgccttctcagcatctcttttctttcctttccttttcttttttccttccttccttccttccttccttccttccttccttcctccctccctccctccctcccttccttccttccttcctccctccctccctcccttccttcctttcttccttccttcctctcccccctttctctctctctctttctctctctctcccttcttttctgacagagtcttgctctatcgcccaggctggagagcagtggtgcagtctcggctcactgtgcaacctctgcctcccaggttcaagtgatgctcctgcctcagcctcccgagtatctgggattacgggtgcctgccaccacacctggctaatttttgtatttttagtagagatggggttttgccatgttggccaggctggtctgaactcctgacctcaggtgatctgcccgcttggcctcccaaagtgctgggattacaggcgtgagccactgcgcctggcctctcagcatctatttctctgccttcttgatcacccctccctgcgcctcagtccatcatgggggaatcccaggtgagatgcacttgtactcctagcgttacaggaaagggatcccaatccagaccccaggagagggttcttggatctcgctcaagaaataattcaggacaagtctgtagagtaaagtgaaagcaagtttattaagaaagtaaaggaataaggaatggctactccatagacagagcagccccgagggcagctggttgcccattgtcatggttatttcctgatgttacgctaaacaaaggtggattcatgcctcccctttttagaccataaagggtaacttcctgatgttgccatggcatttgtaaactgtcatggcgctggtgggagtgtagcagtgaggacgaccagaggtcactctcgcctccatcttgattttggtgggttttggcccacttctttactggaaactgttttatcagcaaggtctttatgacctgtattttgtgctgacctcctatctcatcctgtgacttaaaatgccttaactgtttggcaatgcagcccagtagttctcagcctcattttacccagctcctattcaagatggagttgctcttgttcacacgcctctgacactagtcgtctcactgcagagctgctgagctgccttggatactgggctaatcttcagagaccagaagctggcaaggctcacaatatgagccttggctgctcacaccttcccccaagggaatccctatgtgcagatggggtttggataggcagaggggagagacccctccttctgcaaattcaggccaaagatgggtcaagccctgaagagcagaagccacataacttttgggccacactgtagacccagtgggtgaactgcttttctcagccagcaggtccactggggctcacccaggctaagctagatgccccctggcaaggttgccaactccctgacctctacctaacgacccagggaggggaatggcttgccagcccatcactcctgcagcaactgtggtgggaaggatgagaaacgtaattaaaatctcaggcatcttttcccaagggtcattccagctgaagagcctaaatatcataagggtatgaatgagctgcatttattattttcaccatggagacgtccaagaaaactgaccttttcagcttcaataaaaacggattttcctgcagatactttgacaacagctgtgatcatgagcttggctgaaacttaatattaaacaccaaagaccaggaaaaagagatgccttcccaaggcctgggagagttactgacacccgcttgcaattagacactggtatgggcatggcagcctgagcccagctcacagaggctcactcactcctctctggatccagatggctgaggaacccactcagcatcaaagccacctattatttacgcgtttagtttaaggcatgtagcacgggactcagagcaaagctgcagtagcagactgccctggaattcagcaggactaggttccggtctgcttggattcagcatcccctcctgtcatgtgaccaggagccccagacatcacactctggctcgtcttcccctaaacacagcccagagctgaccctcctgccatgacttggccatactagttggcaaaaagcttgccaacttcctgccccaccatttctactgaccatggtagccaatacccagaggaacagatgacagtcaatggcagctgctgccttgcactgaaatcaggtgttggacagtaacaaaaccttgagttccctctaaacacctgtgcctgaccccaggcattttgtcctccctgtcccaaccctgctgaaaccacctttgccaaaattatgactgagaaaattattacagtaaaagagatctgactgaaccaactccgtcttgctcctaacctccaagttgtccttgttcattcctgggcataggccgaactaactttgggaggaacttggtttacagtttaattttgaaacaaagatgataacagccttttcccaaaacaaacccccttcttgcttggggactagactgcctttgcaggactaaaaaattagccacataagattagaaattatggtgtaggagtcactgttgcaaaatctgagattggtgcttttgcagatcttctgctccagtgcaccagctgatgccacccaaatcgataaactggctcatctggtcttggggccccccacccaggagctgactcagtgcaagaggacagcctcacctcccgatgatttcatcttcaacccaaccaatcagcacttaccactttccaaccttctacccaccaagttacccttaaaaacccttgtcccccaatttctgaggagattgatttgagtaacaactctgtctcctgtgtggcgtggctggcctcttgtcagttaaactctttctttactgcaatgctgtggtctttatttgtgcagtgggcatgaagaatctctcaggtgggtacactgccaccatgaaagtgaagcaatttaaaaaggtataaaacaataaggacaaaggcaaatgaggagagagtagcaacgagagatttcaatgaatttcagaaggcagaacttggaggaaggcaatcttactaggcagagcagagaaagcacctgaggtgctttagaggagactggtgagcatgagcctgtcagagatgtttgaaccacagcaactccatcttgaatagaggctggataaaatgaggctgagacctactgggctgcattcccagattgttaaggcattctaagtcacaggatgaaataggaggtcagcacaagatacaggttataaagaccttgctgacaaaacaggttgcagtgaagaaacccaccaaaaccaagatggagacgagagtgacctctggttgtccccactgctacaatcccacaagcagcatgacagtttacaaatgccatggcaacgtctggaagttaccctctatggtccagaaaggggaggcatgaataatccacccctcgttcagcatatcatcaggaaataaccataaaaatgggcaaccagcagcccttggggctgctctatctatggagtagccattcttttattcctttactttcttaataaacttgctttcactttacagactcatcctgagttctttcttgcacaagatccaagaatcccccctctcttggagtctgaatccaaacccctttcctgtaacatgcccattaacacagaacctcaggcaagtggtggggatggattccggaagctgggactgggaatgagagtttaggaggattaaaaacaagggagttggatgacgtcacagaagagtgcagttagaagctgcaggaatctttccctccaccctaacaagttttgatctggcaagggctgtctaaagcaactattttggaactctgcagtctagttgaacacgttcggcatccaagagaaaacttaatggagaagctggtgaattttaatacatttccatgtttgcgtactggctaccatcccccacctgccagccccgtggcaaacagctgtggggacagtggcctgcattcctggtgtgacttgctggtgccagggtggggaataagaaccttatcctccaaaaattagagttgtgtgttttgattgctgatccttttgacctctgggggactggcacagagtccagccattgtttcagatcacaagagctagagcagcttttctgctgtgaggggatttaaagagacatgacttccctgttccctcccctcacctcaacaattttgggagccaaacatttaaggaaatctttgtcaggtcattgactgacagagacaacggaacaggaacttcaaggaccacatgcaataagcaatcacaatttgtaaaaataatctggaaaaaaatcacagatggatggctccatccttaacaagcaaaaatccacaatccttgaggagtgtgagagttagagttccaggattaccacaataataatcagaatgcccagtactcaacaaaaaaagtacaaaacatacaaggaaataggaaagtatgacctgttcacaggaaaagaacatttgacagaaaccatccccgaagaagaccagacataggaattactagtcaaagacattaaatcaattatcttagacacatttaatgagctaaaagaaaccatggattaaaaaaccaaaggaaattgagaaaataatgtctaaaaaatgagaatatcaataatgagaaattataagaaaggaaccaaactggtcttggaactgaaaaatacaataacttaaaatgaaaaacttactggaagcattctacagcagatttgagtaggcagaagaaaggatcggcaaacatgaagataagacaattgaaagtatccagtctgaggaacataaataaaaatgaatgaaggaaaataaatagagcctgaaggatttatgggatgtcatcaactataactatgcattataggaattacagaagaaggaagagaaaggggcagaaaaacatatttaaagaaattgtggctaaaggcttcccaaatctgatgaaagatatgatatagatactcaagaagctcaacaaactccaaacaggataaactcaagagatccatactgagacatattatactcaaattgccgaaaccaaagcaaagagagaattttgaaagcaacaagggagaagcaattcatcacgtacaaggtatcatcaaaaacttaatagctgatttctctttagaaaccctgaaggctaaaaggcagtggggtcacatatgaaagtcctggaaaaaaaactcaatcaaaaattcaacatctggcaaaactattttttaagaatgagggagaaattaagacatttcaagaaaaacaaaagctgagggagatcattacaaatagacctgccctagaaatgctaacaggctggatacacacacacacacacacacacacacacacacacacacaagacagtaacttgaagctgtaagatgaaataacactaacactggtaaaggtaactacatagataaatataaaagccaatattatttttccttggtttgtaacttcctttggtttggattggttttggtttatacttttggtttggtttgtaacttctccctttttcctacctgatttaagaaactaatgtatacaacaataattgtaagtctatgttaatgggcacataaggtataaaatgtaatctgtgacaataataatgtaaagaggagggatgaagatgtataggaacagagtatttatattctattgaaactattatccaaatttaattgttataagtttaagatgttatttgtaatctccaaggtaaccactaagagaataacctaaacacatatagaaaaggaaagaaaaatggaatcaaaatgatacactacaaaacaaatcaactaaatttttaaaaaggcagcaatgggggaattatacaacaaaaatcatgtaagacatacagaaaacaaatagctaaatggcagaagtaaatccttctttatctagaatatataaaaactcctgcaaatggacaatacaacaacgaaaatccccaaacaactcaattttaaaaatgggcaaagaatttgaatagaagtctctccaaaaaagatatacaaatagccaatacaagatgattggctaatatcattagttatatggttcagcgtccaagagtccaatatgctcaatatcattagtcattggagaaacgcaaatcaagaccacaatgagatatcacctaacaccaattagaatagctataatttacaaaaaagaaaaaaaagtttaaaagcacaccagaaaataacaagtgttgatgaggatgtagagaaattgaaaaacttgtgcatggctagtgggaatgtaaaatggtgatgccccagtggaaaacagtttggtggctcttcaaaaagttgaacatagaattattatgtgatccagcaattctgttcctaggtatatatccaagatattgaaaaacagggatgaaaatagatacttgtacacccataagcagagtgtcactggtgaagggtgttcaggttcttggcattttgaacaaagaattggacaaaatgcagaaacaaagcaaggaaagaatgaagcaatgaaagcagagatttattgaaataaaagtacactccatagagtgggagcaggcttgagcaagcagttcaagagcccccttgcagaattttctggggtttaaataccctctagagattttttttattggttacttggtttacaccctatgtaaataaagtagtggtttgcaaccagtctaattggttgcagaaggtggccaaccagaagccgaagtgaagttacaaagttacagatgaagacttggtctgtgaccagtctgattggttgcaagaggggaccaatcagaggtactttcgtctttcatctgcaatgcagaaaaggggttgggagttgcaaagggagtagccactgatccttttgttacttaaaggtagggttttcctcttgattcagttctaggaagtcagcatggatcagcctaaggttctctgcctccagactctattctcctgcctcaatagctgcatttttcaaaatagccaaaaaggtgtaaacaacccaagtgtccattaatggatgaatacattttaaaaaatgtgagatatatatatacctgcaatggagtgttattcagccccaagatgtactgaaattctgacccatgctacaacatggaaaaaccttgaaaacactatgctaaggaaaagaagccagacataaaagggaaaacattgtataattccacttgtatgaagtatctagaatggccaaataaatacagacagaaagtagaatagaggttcccaggggctggggcaggaaggtatggggtgttatttcttaataggtacagagtttctgttttggatgatgaaaaatttctggaagtagatagtggtaatggttacaaaacattgtgaatgtacatactgccactgaattgtacacctaaaaagggttaaaattggcaaattttatgttacatatattttaccaaaaaatttcaaaaccagaggaattggtgaaaaagctgtaaattgagcttctgaaatgccagagtctctctccttgctcaatatccaggagatgagaggctggagtttcattttattaggaaattgaaccaaggagttgaattttagggcatcaggcataagagatgtctggggaacagtgtggattgctaggcctccttcactcaccagatatggcatttccccagtcacataccacccacccaccaccaccaacccccacacacaccacagcacattccacacaccatgcaaacacactccatgttcctggctagaatatcagcaggttctttctggaataactgggctgtcactgagagaagaaccccacacattgcatatgtagtctgtccagtaaaaagaccagcctgttgcttgctcagcctcccaggagtcccgaaagagaagaaatgtagaaggctcagtctgcctggtcaacagcagtccacaaaagacaacagaaaaaacaaatgggaggaaattgtaaaaatactataaggcagtttcccatggttgagggacataattctcttcagttaaaaagcccaccaattgtccagcacaagaaatgaagtaagtttacttcagggttcatcaaggtcaatttttaagtgacagagataggaagaactaaatgttttcaatgagaaaaaaagtatagagcctgtgatgtgcccctctgataccccttcaggaaaacatgtgttgtcccagatgtcagcaggtggcttccagatctcagcccttcaggggtctctacgtgttacagagaggcacctcgccccaggtcatgcctaggtgatccatatccgatggctgttagatgttggagcataaaagtgaggatatctttgttcagttcaggaccctctgaaaagttattcctgctccagagctcccctggggtcaaggaaggctatctcaagcctgaagtgcagtacaacttctccttctgcctaaacctgcctcctttctctctcttttataaatgttaaccacaggagaatctttagtaaacatcctgcatgctaagtctgcttccaagggagcccagcctgcaacagatgtcatacacagaactgggaattagaatggcatctgactcctcaacaacaacactaaaaactagaacacaatggagcaatgcttttaaaattctgagggaaaaatattttcaagctaaaattctatacccagctaaactatcaatcaagaatcagcgcagaataaaggcattttcagaccttcaagtactaaaaatatttactttccaaatccatttcttagggagctgaagaacagggatctgaagaacaagctccaggaaaatgagaaagaacaaaaaatggtgtcatgagaccaggaaaaagaagatcccacacaggagaaaagcgaagcctgctcataaggtggaagcttcacagcagattgcagcaagaggtagaaggttccaggagggaaatcctcaggagtgaaacagagctaatgggttagagcagaagcccccaatttttcttggtccatgacttccttgatgtcttagtaattttttgtagagatggggtctcactacaaaatgttgcccaggctggtcttgaactcctggcctcaagcaatcctcccaccttggcctcccaaagtgctgggattacaggcatgagccattgtgcctggctacttgtttttattttttgtagtgacgggatctcgttatgttgcccaggctggcctcaaactcctggcctcaagtgatcttcccacctcagcttcccaaagcgctgggattacaggcatgagccaccacacctggcctgatggtttagtaatttttgtattgctgtcttcaggctaaaagaaatatctaacagttctgtttattaaatagttagatccaaacaatttaataaatatttatgccctaacagcttagtagccattaaaaaaatattatgcataaatggaaagaaaaataatatttttatttttattttattcttacataaccacaattacttcctgatgggatgtgtctgccttttggacactgcagtttctcaaacctttgcatcaaattgtgcacctgtagcttcattttctgcttcactatgacatttgcccaatactcacttgttatcatagtaactgctgaaacccaactttgcaaagatatagcattattgtaagaaatgtagttcaggggccaggcgcagtggctcacacctataattccagcactttgggaggcaaaggcagatggatcgcttgagcccaggagtttgagaccagcctgggcaatatggtgaaaccccatctctacaaaatacaaaaaacaaaacaaacaaacaaacaaaaaaacacaaagccgggcatggttgtgtgcctttagccccagctgctcgagaggctaagatgggatctcttgagcctagggaagtcaaggctgcagtgagccatgatggtaccactgcactccagcctgggtgacagagggagaccttgtatgaaaaaggagaaaaaaaaaaagagctgtagttcactctaacattagaacagttaactaatagtttgtgatacctaacaaatattgactatcatttggaaaattcaaaagatcctatggtacatctgtgctatgcagtgaatgaactatgatatcctggaactgacttggtacattttgggaattgtgatattagagtatgtcaaaatatagttaatagacttttggctgacattttgaaacatatggaaaaaactaatgataggtatatggaaaaccagacaaataggctgggcgcagtggctcatgcctttaatcccagtgctttgggaggccaaggcaggaggatcacttgagcccaggagttcaagaccaacctgggcaatatagtgagattccatctctacaaaaaattttaaaattgcctgggtgtggtggtgcccgcctatagccccagctacttgggaggctgaggtgggaggattgcttgaccctgggaggtctaggctgcagtgacctgatcgtcactgcatttcagcctcagcagcagagcgagaccttgtctctgaaacacacacacaaaaaatgaaaaccaggctataaaaaagtgaagcaattattgactctagaaacaaggttggacaaaaaatgagacgagatgatatacttcttgacttaacaataaacaatatttgcatgatcataataacatgaacactgaccacagttttaaccaagagtgtgctggggttggtagacaaaagtaaaaacaagctagaaacttgttcacactgtggaacagcaacatagaaaacgacaaaaccaaagaatgaagatagggccgtgtaaacgtgggatttggaaacacagaggcagataccaaggaagcagctataagaggtaaaagtgtcaccaggagaaagattggggtatagggaagtaaaactattgcccttattctaagtcttttggtaatatttgacttctcaaacaatgtgcatgcattgctttgataaccacatttaaaaattaagccaaacaatgttaaaacctaacaaatataacccggctgccccttctaatctacgtaatatttcacatgcaaccgaaagtctcagagctctcccgaggtttctgcaaacctgagcctgagagtggagggatgaattatattctcacagtgctgccagcccggctgatgcctctgtgggattcttgtcctctgcaaagtatggggcctctgtgatttactcatcacacttcacctgccctggcctctccaaatcagctaaaaagagacagctgaggcccaagaggttgggggcctctgcagaggggttccttattaggcacccctttttcttcacatcaggcttagactcccacctctgtctgaggcctctgattcctgtccctgtcccagagagaccctaggagtgacctgcatttactctcacagttggctccaggcctgacacctgcccccgcccccaccaccacacacacacacacacacacacacacacacacacggcaggagggacagcagcaggagcagagcaaatggcacactctcttagaagaacagcagagaccctcatctttccttcaccaggcttcatctttccagaaaagagtggtggatttaagtagcaatttccccctccattacatagtattaccccccaccccatattgacaagcacaggaatcacagtgactgtgcaccgtgaccgccacacagcagtctgaggatgtgatgaccacagagctccttcttggggactggcgtttcccatgctctgcatgtgtgtgtgtgtgtgtgtgtgtgtgtgcacatgcaatgtggccaggccgccatgtgtctcagcagaatggtaagacgagtgaataaggcattgatccctgtgagcccaaagaacgcacgtgttagtctcttagtagcaagcctgtgagcaactgttctcaggtgtcaggagttgtgcctcactcatccagaataactgagagaggactttgggtccctttacagcccccgaggagggtccctttcccaggcaggccaaggaccccagtttgaagaagcttgcctgccctgcaactttattctaaaccctcagacagcaggttctgcattcttccccatcttccctgcagcatttaccaccgcctgagggaggggggtatcctgagcctactccctctttgtggggtgacacctgtctgcacagatattccagggggaggctacctgatggcgaccctctgaccctcaagctggctggtgtgaggatgaagctgcaggtctcgcttctcctctggggagagctggctgggctccccacgatggggcagcttgcagggaaaggggctcagtgcacctggccacccccttgcctatgggctgcatgttgaagatgtatattgaagctgcataaatggcttgtatttaagtaatccttttgactctgccctgggagtggggctgcaaagaggaggttgtggaaagtgcaagggaaaggtccagacctccagcaatggcaatgaagggcgcattctgggtcgagcatgccccagggggctactccctgtaactgctggcccggccccatggcctcagcaccccaggcccagtgtggacataatggcccttcctttagtgccccacaggacaatatccaggataatggaaggggacaaaagccagagcatcccagacacctaagactccttctctgggcctggtgggcatgggctgcagctcctcgggatcccatcctcaggaggtcccctctcaaggctctgccttcttcaaaacctgcctgacacccccaggcatgtgcaaccttctccacctgccccagttgctgaatgaggccctggcagtcactggaaatattcttcacttccagtaagacttccccaccatgctccacctcaccaagaccccttctagaaaacccggctgctacaggccctgaaaaggggagccaggagtgattgagggtggaacgccaagtgtcactacatccgaaattcagatagtcctcctgcagcaagtcaacttgcagacgtcatcaggaacccagcccagccaggtgcagtggctcatgcctgtaatcccagctcttggggaggctgaggcgggaggattgcttgaggtcaggaatttaagaccatcctgggcaacatagtgaaacccccatctctacaataaaataaaataaaataaaattaaattaaaatcagctatgtgtaatggtgtgcatctgtagcccagctacttgacaggctaaggagggaggatcgcttaagcacagaaggtcgaggctgcagtgagctacaacggcactactgcaccccagccttggtgacagagcaagacactatctctaaaaaagtaataataggtagggtatggtggctcatacctgtaatcccagaactttgggaggccgaggcaggtggatcacttgaggccaggagctcaagaccagcctggccaacatggtgaagccctgtctctattaaaaatacaaaaattagcagggcatggtggtgggcgcctataatccagctattcgggaggctgaggcaggagaatcacttgaacccaggagatggaggctgcagtgagctgagattgtgccactgtactccagcctggacaacagagcgagactctgtctcaaaaaaaaaaaagtaataataataaaattttaaaatacaaaagaaaccaggggcatgtggctggtgtccagtctttcctgttctcccaccggaggcgggaccgggctctggacatgcctgagctggtttactgattgctctcctgagctgcatgcaatgggctattctcatcctcttcccagaaaaccccctcccttgactcccaagtccatgcccctctccacccccttgtgcttgggacctgagcttgaactccaaatgcagcagctatgactgcttaagcaggtcctcccgaggagcagggctgctgggggcacacacactgtcctgaggacatgctctgcagccattgaaactgttagtgtctgccagtcaggaaactctcaccttctgcaaggcagtctggctctccatggcctccgagtcaccgcagccctggatcaataccagtgtaaacagagcttcgctgtgagttgttagttgtctttcctggtctggggcgtaattcatactgttggctcctggcacctggctcgccaggggctggcaggggtgctggggagaggggtgtgtggtcagggtgagagcacagtgccctggagggcagttccgggagaacagtgaggacatctccaacaaggggctgggggacaaacacaccctctcccgcagcacaggggactggactctccccagatctcctgtgcagctgagctgcccacatgtctctgtctgtccagcttgctgaggacaatgtgttaagaaccgtctgctcagctcataaagaggcttggcccttccgccccggctctggttgggggtgtttcagggaaacaggctttccagggatgcttcggcatggccgtgccgtatcctggcaaccagacccaaagccacatcctcttgagaggactgggcagggtggggaagtggccactgcgtggggctacccccattgtccactccacccttagctggctctatgcataccctgagctgtgcaggagtcacagctctccctgagtgccacaccctgtcccaagatggcctgcagggcattcagaggtgctattttccaccatggtctccctgggctcctgggaaactccttggccataacctcagttttctcatctgcaaagtgaggtgggctgggagccaccactccctacgataatcccagtgctttgagaagcggaggtggttggatggcttcaggctaggagttcaagaccagcctgggcaacatagccagaccctgtcttaaacaaacaaacaaacaaacaaacaaacaaaacttaaatgggtgtggatgatactgtctttcacagacccagcgctccccagctgcccatgcacctctgccactcctccttcctggataattgatttcaaagcaatggcagttgaggtgactgggctggggtctgtgccgtgcagccctctagacacaaactccctgcccttgaggcacctccttatctccaagcccagccaggtctagtcatcctgggctcctcgctctgtttccccttatccaggagctagaaaaagactcgtggcatactccccgccacccatagcctgctcaatccacagaggtacagatgatccaccaaagtccgcctcattcaggcctgctgactaccttgtcaaaccacatctcctcctacagcagaactgtggggagacaggccccaggctggagtgccccccagccagggcctcaccttcaacctttaatgctccccttgccaggtttctgaacatatctgcaatgacctgaatgtgtctcccaaaaagcaaaatgttggaaacttgatcctcaatctaagtgttgagaggtgaggcccaaagagaggtgataaggccatgatggcagagtcaaaggactaacactgttatcgaagaagtgggtttgtcacacagggggaatctggccctctcttactctcactgtctccccctctcaccctctctttgccctttagccatattgtgaagcagcaagaaggctcttatgagatgctgaccttgttgatcttgaacttcccagccttcagaaccacgaaccaataaattcctgttcattataaattacccagtctgtggtattctgttacagcaacacaaaatggactaagacagtcttctctgctgtctctcccataggcagttctgccagatcccccaaagcccaccaatcccctcaccccagggctccagaagaggttatgtcctctttggaggtggacccatcctgatggccttggacctgtggctccctgggcctcccatcagcccctctatttggagagtcactgcagccaggagccccaagaagggacttctcaattccccaatagtggacactgtgttgctccacccagatctcctctccaggggctgatgccactatgctggtcggggttctccaaggagacagagccaacagatagatagatgatgatagatagatgatagatagatagatagatagatagatagatagatagatagatagataaacacacatgagagagagagagagataacagaagtcaggcacagtggctcacacttataatcccagcactttggaaggccaaagtgggagaatcgtttgagcccaggttcaagaccagcctgggcaacacagtgagacccccatctctacaaaagatctgtatgtatgtacgtatgtatctattatctacatgagattttttaggggaattgtctcgtggttatggaggctgaggtttcccatcctcagccacctgccagctggagacccgggtatgttgggagtgtgactcactccaagtctgaaagcctcagaaccaggaaagctggtggtataactctcagtccgaggctgaaggtctgagaacctgggctgggggccactggtgcaagtcctacagttcaaagcctggagaacctggagttctgatgtctcagggcaggacagtagggatgtgtctgctccaggaaagagagtgaattcacctttcctctgccttttcgtgctatccaggcccccagccaattggtggtacccacccacattgagggcggatcttcccaactcagtccattgactcacataccagtctcctctggaaacaccctctcagacacaaccagaaataatgctctcccagccgtctaggtgtcccttaatccagacaagttgatgcctaaaattaaccatcatggccattatccccatgggagctgggaatatccctgccttcttccctgggaattcccttggcacccgggaagcacctttcctaagtttatgcctcctgtggggtgatcctgtatccagcgactggctgatgtgggagtacaaagccctgcccctcacctcagtttggggcaactctgaaggcgtgtccagctccagggctcccccaggcctggctgaggcctagctgtaactgcactggggggtcgccttccctctctgcccaccctcgccctccccgcttccctatagggggtctctcctgagagccatcagtgtaaacctcctgccccaaactctccacctcagctgcttccagagaactcagcctaagatgcctttgggctctggggccaggtggctgtgagcacagggggcacgggcttgcatcctcttggaattttcactgcaaactcagagtcctgactttcacaggtctggccgtctcatgggtctggccccataggccttccctagctcagcccttgggcagcagactccctttgtaatagacactgtggctcctcttcgatgccctgttccatactgggcacctctgccctggattccaccatctgtacctgccactcctcagaagatcacccagggttagggagctgccctgcccacaggtgcagagagtcttaagttcctggaagctgatgagagcctgggcagtgcttagtcaatgactgacaggtgcaggagtaggaaagcccagctccattgcctcaaggtgaggacagccggactttgcctgagatcccaatcttgattgacttcttactcttccctggcctgatcccccctacctttctagcatcagggactagtttcatggaagacaatttttccgtggatggtgggggaggggagatcagggatggattggggataagtctgtttcaccttagatcctcaggcattagttagattcttataagaagcatgcagcctagatccctcacatgcacagttcacaaaagagttcacactcctatgagaatctaatgccaccgctgatttgacaggaggcagagctcaggcaataatgttcactcacctgccactcacctcctgctgaggccatgaaccagtactagtccatggcctggggcttaagaacccctgctttataactcatttgcccatgaatgtcgatctcaggcttctctagggaaccccacccaagacacttctctcaacaagagaaaaaaatggagtccagacagcgccaacatatatacacacattcaagcctggggggcttgcatcttgtagtttgcatgtttatttcaggccgggaaggactttctcccacccaaggatccgccatgtgagaatcactcatccgcatttccttccattatttttgagagcttcatttgttatgattaaagctttaatccactattggaatttattttggtgcatggtgttgagaaggaaaccaatttaatatttttcataaaacagttaactaatgatcacagcaccatttatttatttatgtagtttttaaattaaaaatgaattagaacatgaaatgatctccaagatattattaagtaaaaggaaaaacaaagtgcaggatagtgtgtataataagctcttatttatttatttattaaatacataaaaggaggctgagcgcggtgactcatgcctgtaaccccagcactttaccaagggggaatattgcttgaacccaggagttcaagaccagcctgggcaacctagtgagactcccatctctaaaaaattaaaaattaaaaaaattaaggttgaccgggcacggtggctcacgcctgtaatcccagcactttgggaggccgaggtgggcggatctcaagatcaggagattgagactatcctggagaacatggtgaaaccctgtctctactaaaaatacaaaaaaacttagccaggcgtggtggcaggcacatgtagtcccagctactcgggaggctgaggcaggagaatggcgtgaacctggcaggtgaagcttgcagtgagccgagatcacgccactgcactccagcctgggcgacatagtgagactctgtctcaaaaaaaaaaaaaaaaaaaaattaaagttgtacatgtctgtagtcccagctactagggagactgagacaggagggttgattaagcctgggaactcgaggctgcagtgagccatgatcatgccactgcactcactccagcctgggtgacagagtgagaccctgtctcaaaacaaaacaaaataaaacatacatataaggccatctataggcatggacagtttctataaggttttgtagaaactgttgatagtggttgcctcccgatagagggccagggctctgaagtggaaaggagaactacttctcactgagtattctgtgatccatttgaattttttgtcatattcggtcattagctttttagtaaaatttaagcgaattttaaaaatttaagactctgtgggttgcaagtaacaaaatgtaactgaagctaacttgaacataaagggacacatgttttgaaggatgcagtgatcaccctggagccctaagccaggagggcagccagtgtggagatgcgtggaatgaaggatgctaataggataccccctcctgcctgtccagctgttcccaccctacatcagaggacttctctcccagcagaaagtgcctgaaacccacctgaccctgcccactctcgccaggcagggataaggttcgtcttcttagagcatacttcttttttagagaaagcaggccactccactctatctgcctgccttcctcgttgtgccacccataggctgaatgataatgaaatcttccccaacacaccccatggatggtagccaatttcatttagaagagagaacatgttaagagccttctagaatagaacttcaccctacttggttgccagtccaaagcagataccatttcttccttcctggagagaataaggcagtgatggttccagtgaattcttaccttccataattctttggtggcttgtttccatgaccagcagtcaccccagggtttgcttgtaatggggggaattccctatccagtgtcctgtggggacacccagaaaggagcaccgtgggggatcccctgaaagggctgacggccgtgatgatttactcccacttagagcctgaacacaaaactgtggctttcttgagggactgagaatcacaagccccctgttggccagattttcttttttctggtactacatctcttataaaatcctgagctgtctaactatagggatttcctatagccttactctctattggtccctactcttacagccaagagccaataagcccatcaattacatttctaatatataaatgtgaaaggaaaataaatcttggaaccccaaaatcactaagctaaaggaaaaagtcaagctgggaacttctcatggcaaacctgcctccctttctattcaatgatctaaatgtgtctcccaaaaagcaagatgttggaaacttgatccccagtgcaagtgttcagaggtggggcccaaaaggagaattgataaggccatgatggcagagtcaacggattaatgctgttattaatgtgagcacccctctgtgcactgagatgatgcatatctgattgccttcttcagagaggctaatcagaaactcgaaagaatgcaaccatttgtctcttatctacctatgatctggaagccccctccccactttgagttgttctgcctttgcttcgagttgtcccacctttctggaccaaaccagtgttcatcttacatatgtcaactggggtctcatgtctccctaaaatgtataaaaccaaactgtgctctgaccaccttgggcacgtgttgtcaggacctcctgaggctgtgtcacagatgcacgtcctcaaccttggcaaaataaactttccaaattaactgagacctgactcagatatttggggttcacataaccaggggagatatttctcagtgttcaatgggacaccttcactattgacttatttccttactcccatcctgtctcagtaagtctttgagggaggaacagtttactcataaccccacttctggtaccaaagttgatctttgttaatattcttctgattatttcattcgactagaataggcttagacacaaacatgttgttgttgtattttaaagtatgcagaatctgtggacaggaatccagccaggtttcaggaaaatctgtgactcagcctggactcccattaccacatgactgagaacatggctggcccctttcttgactatttaaatcactggtttagccacaggaagggctgactttcccagctctattccaaaattctggtcaggggaatctctgttggccaagtttgggataatgactactcttggttcaaacttcataggccaggatggaggtagggttagggttggggagcaggtaggatgatattgtacggaatggacaccagcacaattgtcaaaataaggggctgggattagagacttgtttgaacagagaagacatctccaaaaggtaaacaaaaacctaaagatatacaggcacacctcattttattgcatttcactttattatgcttcacatacattgcattttttacaaattgaagatttgtggcaaccctgtgttgagcaagtatattggtgtcattttttccagtcacatgtgctgactttttgtctctgtgtcacattttggtaattcttgcaatatttctaactttttcattattattgtatctgttatggtgatctgtgatcagtgatttttgatgttactatgtacatgtacatagtatgtacatggtaactatgtacatattactatgtgtacatacatgaccctataagacagtaaacttaattgataaatgttgtgtgtattctgactgttccaccaactgaccattctcccctctctcttcctctcctcaggcctccctatgtcctgagacacaacaatattgaagttaggccagttaacaaccctacaatggcccctaagtgttcaagtagaaaaaagagttgaatatctctcacttcaaattaaaagctagaaatgattaaccttagtgaagaaggcatgtcagaagccaagatgggccaaaatctaggcctcttgtgccaaacagctggccaagctgtgaatgcaaaggaaaggcgcttgaaggtcattaaaagtgctactccagtgaatgtctgaatgataagaaatctaaacagcctattggtggtatggagaacgttcgagtggtctggatagaagatcaaaccagtcacaacattcttttaagccaaagcctaatccagagcaaggccataactctctttaatcctgtgaaggctgagagaggtgaagaagctgcagaagaaaagttggaagctagcagaggttggttcatggggcttaaggaaagaagctgtctccataatataaaagtgcaaggtgaagcagcacatgctgatggagaagctgcgtcaagctatccagaagatctatctaagatcattgatgaaggtggctacactcaacaacagattttcagtgtagacaaaatagccacctattggaagaagatgccatctaggactttcagagcttgagaggagaagtcaatgcctgacttcaaagcttcaaaggacagactaactctcttgttaggggctaaggcagctagtgaccttaagttgaagctaatactcatttaccgttctgaaaatcctagggcccgtaagaactaagctaaatctaccctgcctatgctctgtaaatggaacaacaaagcctggatgacatgtgtttatagcatggtttactgaatatatatatatacacatatatatatttttttatagtctggaggtcttttttttttttttttttaacaagtattatgccatgagttcatacggaataggttccagcagctcaggctccttctcattggttctcacaaagtgtgcttctctgggtggagcaggctggcacttcagttgaacccaggtacctttctctttggcttctttctttttctgatcattttccttcatgtatttcaggaagctatcccagctctcagagtgcttaatgtgctcaatacgcacattaattctcttggcaagaatcttgctcttaacttgtttgtttacaacaatgccaacagcatgctgggtaacattgtagactcttccagttttaccatggtgacacttgtgaggcattcctttttgaacagtgcccattcccttgatgtctacaataacacctttcttatagattcgcatatacgtggccaaaggaacaactccatgttttctaaaaggcctagagaacgtatatcgggtgcctctcctctttccctttgtcttcgtcattttggcaaattactggaagatggcagttccggctgaaagggtggtttactgaatattttaaacccactgttgagacctactgctcagaaaagaagattcctttcaaaatattactgctcattgacaatgaacctggtcacccaagaactctgatgcagatgtacaatggattaatattgttttcatgcctgtgtaggggagtcagagatcaccttcaacactcccttgagcacttatgtgggctgttcggctggatctagaaaccaatgcacacccaggtaaatgaacaagagaaaagcatatgaatgttatgagttttacatgtacatggggatcttcacaagagagtgaagtctgaagaagtggccaaagcaagatcttttcatactttttagataaagaacaatgaatttgagaagaaataacaggacaaagaaaatttggcaggggcagtaaattttctaggggtcactagaagatatggagagggaaactagtggaagataacagttactttgttaaatctatttattcaggtccattgtagccaccaaatcccagtctctgttgatcagagctgttttcttgccctggtataggtgagggtaccagtctccaagaggaatctttatggcttgctgaatgcagaaagaggtcagctagccctttctgcaatcataatttctttgatgttcccaaaataatcaatataccaagatatgattggtataataatcattataccaatcaataatcaatattttgagatggcacgtcctttgctccttcatctactaacacaacatccattctgcagcccatggatcaaggagtaattttggtttttaagtctcattatttaagagccatgtgttgtaaagatacagctgtcacagggagtggttcctctaatagatctgggcaaagtgaactgtaaaccttttggaaagaattcaccagtctagatgccagtaagaatatttgtgatttatgagacggaggtcaaaatagcaacatcaacggaagtttggaaaaagttgattccaatcctcatggatgaatttgaggggttcaagacctcagtagagacaataactgttggtggggtggaaatagtaagagaactagaatgagaaatgaagcctgaagatgtgactgaattgcttcaaccttgtgatcaaacttttacagatgaggagttgcttcttatgcatgacagaagaaaaagtggtcacttaaatctactcctggcgaagatgctgtaaacattgttgaaacgacataaaggatttagaatattgcataaacatagttgataaaagcagtggcagggtttgagaggattgactataattttgaaagaagttctactgtgggtaaaatgctatcacacagtattgcaggctgcagaggaatctttcatgaaagaaagagtcaatcgatgcatcatatttcattttgtcttattttaagaaagtgccacagccaccccagtcttcagcaaccttgaccctgatcagtcagcagctatcatcaacattgagccaagaccctctaccagcaaaaagattacagctagctgaaggctcagatgatcattagcatttttaagcagtaaagtatttttaagttaaagtatatgtatttttttagacataatgctattgcacacaatagactgcagtatcatgtaaatatagcttttatatgtgctgggaagcaaaaaaattcatgtgacttgcttcattgcaatatgtgctttattaagttggtctggaagtgaacctgcaatatttctgaggtatggttgtataagatgtattttctttttttttgagacggagtgtcgctgtgttgcctaggctggagtgcagtggtgcgatctcggctcactgcaagctccgcctcctggattcatgccattctcctgcctcagcctcccgagtagctgagactacaggcgcctgccaccacgcctggctaacttttttgtgtttttagtagagactgggtttcaccgtgtttgccaggatggcctcgatctcctgacctcgtgatccgcccgcctcagcctcccaaagtgctgggatgacaagcatgagccactgcgcctgaccaagatgtattttctatttcaagagaaatgtctgtagatgacagaaaaatcagattcaagaaaacaggaaatacccttgataccacctgctcagacaattactattaataccttggttttggggtggttttttgttttagtttttagagatggggtatcgctatgttgcgtaggctggacttgaacttgttgttcaaccctcccgttccctcctccacgtcatccttgggtacacgtcctaacagtcttttttccccattttttttttttttgagacagagtttcactctttttgcccaggctggagtgcaatggcgcaatctcagctcactgaaacctccgcctcccgggttcaagcaagtctcctgcctcagcctcccgagtagctgggattacaggcatgctcatgcgccaccaccccagctaattttgtatttttagtagagacagagtttctccatgttggtcaggctggtcttgaactcccgacctcaggtgatccacctgccttggcctcccaaagtgctgggattacaggcgtaagccaccgcacccggctgtgtccccctgtttttgtaataaattttacatatatgtggcggccaaatataaatgctcaccttgctttattagagactggaaactatttgatctttcttctcttttttgttgctttagagagacagaatacaaatatctcctctctcctcctgggaagctttgcaaaattaagcccttcctgccctggagagaaaagggtaatcaggtttttggttcttaaatgatagactgaatggctcatccaatcaggcatattgtgaaagaacaagagaagatgagcagtttgttggcatttgaggtgtgcaataaataatactgttccctccccaccacgttttgaactgattgaaaaataaaatacagtaatcagacagatggagatgaaattgtcagcactgatgaggctaacaggatctgcagccctgttgcctgttgggcttcctaatacacacataaggaaatatacatataaatatatttattatatataataaatatttatatattatatataagtatatattttaattatgtataataatatatagcaacatatatgtaataaatgataaacatatactttatatcatatataaacttatatatgaagtttattattatgtgtatatattatatatgaagtttataatatatgtttgtcatgtatacctatgaagtttattattatatgtaataaaaatatctattttattatacaggcagagtctcactctgtgtccaaggttaagtgcatggtgtgatcatagctcactgcagccttgacctcctgggctcaagccttcttcccatctcaggctcttgagtagctggtgctacaggcatgcagcaccacactcagctaattagaaacaaatattttgtagacacaagatctcactatgttgctcaggctagtctcaaactcttggtctcaagtgatctccccacctcccaaagtgttgggattacaggcctgagccactgtacctggcctggacttcctaatattataccccaccaccaactccttcctcaccagctgggacaatggttagtgacagccccctgcatacacatctgcaaaaatgggtcgtaccatattcactttgctctgaaacctgctctgttccttatcaataccttttactttatggatctccattaactgggatcttagttgttataacttcggactttttatagagagtgctgtaatgaacatctttattcatacattgtttttaatctatttgatgatttccttatgataaattccaagaagcggctcacattgcaactgtgtacatatattgccacattggtatcaggaagatggtaataattcagaatttagctaacagtgtttgaaagttcttgtttttccacatgctcataggcattggcaatcctcctttttaactctttgcaaatatgatagaccaaaacattgttttaatatacgtttctgttggtcactgaagttgaatgtcttttaatgtttattgcatatcccctcttttggaattgattgcctttgtcttttcatcttcttttattgattattaagagctctttatatgttaagaatgaaaccacctttgcaaaaattatgacagtgagaaaaatctggcatagcttactccatcttgcttctagcctcgaagttgtacctattcattcctggacacatgccaagctaactatagaaggcagttagtttacagtttaactttgaaacaaagacgattacagccccttcctaaaaccagcatctccttgctttgggaccaagattgcctttgtaaaactaacagattagccacaaggttaacatatggctaagagacatgtagccaggggccacaagattcctaaccttcccaattgcccctagagattgcatctattgtaaaacctaaggttggtgtttgaggtatttcccagaccctgcattctgatagaccagcttccaccacccagactggtaaccataccaagaaactgagtcaactgaagtcaacaatcattcaaccccatatgatttcatccctgaccctaccaatcagcattccccattcctctggctccttgccaccaaactatccttgaaaaaccctagcttctgaatttccagggaggcttatttgagtaataaactcccatccttccacttggctggccctgcaattattaaactctttctgtactgcaataccgctgtctcagtgaattggctttgtctgccacaggcaagaataacccattgggcaattacaaggacaatgatcttcttctcatcgtaatatgagcaaatatatataagcataatatgagcaaatacaaaaatgtgagtattgcaaatgactctctacatacactgtcttggtaaaattttgttttctggttttatggatgatatataggaatcacctggaaaattttcaacatacacaagctggctaaatttactaaatatttagtatattccagacactcctctaattgtctcacatacattaatttatcaaattctttaatcctcacagcaatagctctgacctgggcactgagaggttaaataactgcccaaaggcacacaatcagtaaatgggatccaaacttattgactggccacagaatccttgttctaactctgtcctaatgccacatgtattgagttgaaacactggagagtctgcaaagtttccttgggatgaagctggtatgtgcatgttaaaaaactcttcaggcaggctggacgcggtggctcacgcttgtaatcctagcactttgggaggccaaggcaggtggatcatgaggtcaagagatcgagaccatcctgaccaacgtagtgaaacctcgtctctactaaaaatacaagaattagctgggcgtgggggcacgcccctctagtcccagctacttgggaggctgaggcaggagaatcacttgaacccgggaggtggaggttgcagtgagccgagatcgcgccactgcactccagtctggcaacagagagagactcgtctcaaaaacaaacaaacaaaaaaacaaaaacaaaaaaaactctccaggcggttttgacatgcccccaggatgagtaccactgattagtagtgttttgtttgtattttgcctaacagaagttttaaatttttaatgtagtcagatttgtcctatttctgtcattttattctttagtactgcaataagaaaagagtcttcctcagcccaaatgcatcagttatctattgctgcacaacaatctgctctcaaaacatagtggcttaaaacaatagcagtatactacttgtttcaattatctggatggcatttaggtggagctcagctgggtggttttcctgctggtctcacctgggatcacttacacaactaaagctgacagctggttctggctttgggttggggcatgaaggagttccggaaattccaccccaaaataagccattttgaacttcaaactgagggcacttggggaagagcaaatgcaggaaggagattcctctgagcttcccttatctgcctgaagacagagccttctaaaggaactcagttgtcatgaatttcctccccaggaatctcatcagtcaaggctgtttaactcagatcacaggagaggaagctggaggtcaacaatatgtcaacactttgtcccaggctatcacttgttcttctgaagggtcatccatcattccccaaaaatcacttactctcccctaagctgcctacatcccctctttcctatggtgagggtatatatgtttctagatctcactgggttggagaatattcatttttccttcctgcaatgctcccatgcatgtaataaattgatatacctttttttcctattaatttgaccactgtcagtttatttcacagacacaattactgaatcctcaggaagtagaggcatgtttttctctcccctataggcacctcggttctgcaccacatggcttctcatcctctaagaggctagattggcctctttgtgtcgtggtggtctcagggctccaagagcgccaggtggaagttgcaacatctcttaaggtagaggctccggagctaacatgatattgcttctcctgcactatattggtcaaagcaggtcatgaggccagcctagatccaagggatgatatctttgttgacttcacttcttgatggaaagaacaacaaagccacattgcaaaggggagtgggcatggggaggcgtgactcattggatgccactcttgtaacaatctaacacaccaagatgttaaattcactcttctatgaagtcttctagtaccttttttttttttttttttttgacagaggtttgctcttgtcgcccaggctggagtgcaatggctcactgcaacctcctcctcccgggttcaggtgattctcctgccttagcctcccaagtagctgggattacaggcatgtgccaccacacctggctaattttttgtatttttagtagagacaggttttcaccatgttggccaggctgtttttgaactcctgacctcaggcgatccacccgccttggcctcccaaagtgcagggattacaggcgtgagccaccgagccctgccctactacctttttttaaggtaaaatttacataatgtaaaattaaccattaaccactttaaagggtataatttaaagagatgatccacatcatctctatctagttccaggacaattttatcaccccagagggaaaatccatacccattaggcagtcactccccattctcccctccttgctgcctcagcccctggcaaccaccagtctgttttgtttctctatggaaatcatacaacatgtggccttttgggtctggcttctttcacttgccatcatgcttccaagatttatccatgttgaagaaggtatcggtgcttcattcctttttatggctgaataatattccaccatatggatataagacagtttgcttggctattcatctgttggatatctgagttgcttctaccttttggctatcatgaatatcaccactctgagtatccagtactctcttgattcttcttaagttgaaatcatttccacatctgagattcaattttgtatgtggtttgaggtaggaaatttcacttcatttcttccacttattcctatgtattttatacactattcttcttatactgactttatcttcctcttttgttaaataacagtgtgtgcccttgagcaggttttaattttttattgtttattttttgagacagtctcactttgtcacccaggctagagggcagtgacacgatctcagctcactgcaacctctgcctcccaggttcaagtgattctcctgcctcagcctccaagtagctaggattacaggcatgcaccaccacacctaatatttgtatttttagtagagatggggttttgctatgttggccaggctggtctcgaactcctgacctcaggtgatccacccgcctcggcctcccaaagtactgggattacaggcatgaaccaccgtgcccagtcttgagcaggtttttaaaaggatttttttagagatggaatcttgctttgtcacccaggctgcagtgcagtggcacaatcatagcttactgcaaacttgacctcccaggctcaagtgatcctcctgcctcagcctcctgagtagcttggattacaggcgcaaggtatcacccctgacttgggcaaattatttaccttttttgtgctttaatttcctcatctataaacttgggatagtaatggtaacctacatagggttgatgtcaggattaaatgaattaatacgtgtaaagtgtttagaacagggtatagtccatagcaggtgccaagtaaatacctattatttaattccaaatttctacatatgaaaggatctactttctgttctgttgtcttacttatctatttcaacttttaatcagcatcccaagtctacttttattgttctttttcaaatcattttttagttcatcttggtcctttggaattcttcccattgaattttatcaagttctccctaaatcctgctgagaactttattggagttacatttacagattaatttaggaggaattgaaatattgttactaccaagtattcttatgccataacacatctcttcatttattaagctcttattttatctcccatgatagagttttatagatttttaaattttataaaggtgttgcaaatttcttttcctggatattcttttctgggatattttatatttttgttgttatgctgaatctttttaccccattatatttatttttatttatttgttatttttaaaaatattttttattatatagagacagggtcttgcttattgcccaggctgttcttgaactcctggcctcaagccattcttccaccttggcctctcaaagtgctgggattaaaggtgtgagccacagtgaccagtccttgttacatttaaccagctactattttctatatgggaaaactacagatctcagtcctttttttttttggtgatattctaatggtttttcattcatttaattttttgaaatcagataattgccatcttttctctttttccatcattgtatctattttttttcttgactaattgcacaggctaagactctcggagcaatattgaataaacaggcaatggtggctctaagacagggtttgaggaatggcagtgggcggcagggagtgtgcctgcagagcagcctgaatgggtatttcccggagggaaggtggtcacgtgtctagggaatgctccaaagaaaggagaggatggtttcagtacagagtgagggttgcgcctttgattaggtaagtggtgaacagttattagtgctttctgagcatcagactggcagagtcaggtcatattttagaaggactgctcaggtagaggtgaccacagggaggtgggacccagacaagtgtgacccattaagtccttacgaatcattaaaggagaggtgctaaggatgggagctgagtgcggctatgatggaagacgccaggagattctatggagattagtgttatcttaaacccctctggccctgcacatggggagagcaagttcatgcttcttcctaaagaagtgaagcaaggacggagcaattttccatctgatgtcaggccctccctgatggctggccccaagggcgacctctgtgatccttcctgtctcaccctggaaaaaaatgtctatattctcacttcatacttccaagttatgccttggttttttgggtttcatttttgttattggttgttggatgtaaaataaatagcaatgcataaaaactcaaatttttcagctgcgcatggtagctcatgcctgtaatcccagctatttgggaggctgaggtgaaaggattgcttgagctcaggaggtccaagctgcagtgagctatgatcgcatcactgcactccagcctgggtgacagagaccgtgtctcttaataaaaacaaagaaacatccaagtgttcaggcctcaaagggctgtggccccagctttcagtgtaactcatctcacaaatcagtggtggtaactcaacttcgtccttctgtggtcaagtttcccccaactgtctctgttatctgaccttccttggctcagccacatatgggtctgggagcacagtggtcatcaacaggtcgatggagatggctggacctcagcagcagaagagcaagaggagccagaggatgaaactccatctggaaactgtgagaggagaagccagcccaggccctgcaggagggagcagctactcttcccagcagaggcaacaaggaggggcaggagcaagcaggtagggagagaaggggcagccttcatggggcagagaggggaatgggctgatgggagctggcagggcttctgtgatgagtttgggcagtggggtgcattttttttgagatggagtcttgctctgtcacccaagtagggtgcagtggtgtgatctcagctcactgcaacctccgtttcctgggttcaagtgattctcctgcctcagccttgtgagtagctgggattacaggtgtgcaacatgatgcctggctaatttttgtatttttggtagagatgggatttcaccatgttggccaggctgatctcgaactcctgacctcaagtgatccgcctgcctcagcctcccaaagtgctgggattacaggcttgagccactgtgtacagctgggtgcatgtttaaaaatagaggtttgctgggaggtggaggttacagtgagtcaaagtcatcccactgcactccagcctgggtgacagagtgagactctgtctcacaaagaacaaaaacaaaaaagaggtttgacctgagaaatggagacacctcaaagtcctagagggatacacccagggggaggacaaggcccagcagaaagacctttgtccctctgaccccaggtcccaccaaggaacccaagctcttgtggtggggggcctacctagaccccactctcaagccataccctggctctgctgggcttccaactggccctagctgcccctggttgtctttattttcataaggatgaaagcaatgccgtgtccctggcttctgggacatcaaggtccgagaatgatggtagacagtggatagaccccaattttctgcccaagcccagcctgggattcctggctgggggctttgacttggcagctggcaccagggtgtctcatggggatgcaggtgatggtttgaaatagcctttgcaaaaattatgacaatgagaagacccactgactctatcttgcttttaacctctaagctgcccttgttcatttgtgggcatagaccaagctaacttatggaaggaatttaccttatagtttaacttcgaaacaaagatagtaacagccccttcctgaaatgaactcccttcttgcctggggaccacaccacctaggtaaaactaaggaattagccacaagattagaaattatggtttaggagtcatgcagccagaggccacaggattcctaacttccccagttgctcctatggataacatcacattcatcaaacctaagattggtgtttgagacagttttcagacactgcattccaatggaccagctggtgccacccagactgataaactggctcagctagttctatgatcctatctagtaagagaagacagcaacaagaacccacttcaatccccctatgatttcatcgccaacacaaccaatcagcgttctccactccctagccccctgcccaccaaattatccttttaaaaccctagtctctgaatgttcagggagactaatttgagtaataaagctccagtgtcctgtttatctggctatgcatttattaaagtctttctctattgtaataatgctgtctcagtagattggctctatctaaccagcaggcaagaagaacccattgggcagttacaggctgctgaatgacaaggctgctcttcccacacctgacagtgcctcagcctcagctggcaaaactcatcacttcacctgaaaagggaaaaaacccagagctatctctggcaatagaaggagcagagttttcctaagcatccaagacagaccccagaccctgaacgaggtaggagactactcatcctggcaactgcttactctgattatggggttatgaggcctgcttcaagggagaactctgaagttgcagctttccctttccatgacagaccttggctcatggaccacacccctgccccatctctgcttggcttgtgtttcatggtctgcatgaagaaccaatctaagtctggttttggctttatttatttttgagacagggtcttactctgtcacccaggctggagtgcagtagcaccatcacagctcactgcaacctcgacctcccaggctcaaggtgtcctcctgcctcagcctctggagtagctgggactacaggtatgcaccaccatatttagctaatttttaaattttttttttagagacggggtcttgctgtgttgatcaggctggtttcgaactcctgacctcaagcaatcctcccacctcggcctcccaaaagtgttgggattataggcgtgagccagcatgcctggcctggcttaatgttcatgtgcttgcccttgctggaaagagagcctattggcaattgatgcagagggagtgttttaattaatggagctggcctgaacatcaggctggtgcaactttactcaacgctaaggatgatcacagcttaacgtgggggagaagaaagcaatgaaagaaatagatcagatgaggcaatattgggagtttatgaagtctgtgtattttccagtggctccacagtgatcgctcttaaaccggctgtcacccccgcatgaattatcacctcaacctgggaggatggggaggccgacaagacatacaaccacacacaaggcacgggctcttgcctggatcataattcttcctcatgctgctaaaacggagagcgctgcgatagcaaagaggcatgtggcccttgtgatatcttcagaaagaaaaaaccctgggggcaagagaggaaagaagaaagctaagaaataaataacaaagcaggatgctatttacatagtgagggaaggcctttgagactgagctcagcgccttggatgtcagtaataactcagtgatgggaataaagagactcactgcaaacccacatcgcctgagatggtatcagcgatgtttttctctttgtttccagacaaattccagcacagcgatgggaagacaagcctgtcgaagggaatggtgaggtgggggtgagggtgagtccggtggtccccgtgaagactcaattatgttggctgtgaagagattaatgagaattgaattttctattgatgtaaaactgccttttgcacctgctgctggcatcctcattactggttttccattacaggggattatatggtacaacgaaataaactttatgcttcctgggggatgctcttaaaatgggtttactgtactcaaactggtggtgaagtgggttacctgagagaaatatgatttaatccctgtcttttccttttgtggaccagaaagcctctatccccttctggaaatcacgaggtgcagacgttttcaggtctgcgggccaggctgaggctctgcgaggtataggcccaggcatgccctgcttgctctgtccctaaacatcacagggatgatgaagttgaaggaatctttggcttcctgcatcagaatgaatcacagggagtgatgctctggaagagctggcccagagaccagagtgtagggaattggggtccttgggatttctgtaacttgtcctttgggaaggaggtaaatgtgtctgtcggtggaggcgtgagaggcatctgtggccttagaagataatgagcaagtaaacaccaggtgagagaaaactgcttcctgtcctgtgaaccacctgctcctccctccctcagttgagctggggaggccagggtccagggtgaaaccatctctgcccaggaaaatctcaataaatgcttctttaaattgttttaagttttagggtacatgtgcagggtccagggtgaaaccatctctgcccaggaaaatctcagtaaatgctttttttgttgttgttttaagttttagggtacatgtgcaggtttgttacataggtaaacgtcccgtggtggtttgctgcacccatcaccccatcacctaggtatcaagccctgcatgcattagctatttatcctgatgctctccatcccccaccaaccccagaagccccagtgtgtgttgttcccctccctgtgtccatgtgttctcatagttcagctcccacttgtaagtgcgaacatgcggtatctggttttcagttcctgtgttagtttgctgaggataatgacttccagcttcatccatgtccctgcaaaggacatgatctcgttcctttttatggctgcatagtattccatggtgtatatgtatcacattttctttaaccagtctattattgatgggcattttggttgattccatgcctttgctgtaaatgcttgttaaatggaaaatagtagcaccaccctcaagagcccttactcatctccaaccaggataagtactgatctttcagcctctgctgttccatctgttaagtgggcataaaccaggatggtgggggctatgggaagccattattctcagcagtttgatgtagaccttatttcatcgaaatcacctttatgatgctaccttctaaacacagcccaaaattggatctccaagaatgcaggtggtaccttgtgtttacatgagggtgcactagaaccccatgttatgggggagccctgtgagctggagtgggaagcctggatgggaagcagaagtgtcagaggcccacacacagctgtttgtgcttgtctctccctgaagcgttgttcaggatgaacctatcttgagccccagagtccacagatgtcactgcttctcctgagcagctgccatggcagatgctttcccgaggcagggcgggggaaatggttgggcaacggctgggcactgccttaacttctctgaagcatcattaaatttgtgttcaaagtgaagattgaggaattgggcgcagtggctcatgcctatcattccagaactttaggaggctgaggagggaggattgcttgagcccaggagtttcaaaccagcctgagcaacatagcgagacctcatctctacaatttttttttaaaaaatagctgtgcatggtggcatgtgcctgtagtcccagctactcaggaggctgagacaggaggatcacttgagcccaggagttagagggtgcggtgagctatgatcacaccactgtactccagcccagacaacagagcaagaccttgtctataaaaaataaaaaaaaagaggctgggtgaggtggcttgcgcctgtaatcccagcacttcgggaggctgaggtgggcggatcacgaggtcaagagatcgagaccatcctggccaacatggtgaaaccccttctctactaaaaatacagaaattagctgggtgtggtggcacgcgcctgtagtcccagctacttgggaggctgaggcagaagaatcgcttgaacccaggaggcggagattgcagtgggccgagatcatgccactgcactccagcctggtgacagagtgagactccgtctcgaaaataaagtaaaataaaataaaaataaaataaaataagaaagaaaaatgtttattgtaaaataaaacagacagaaaaaaataagtcaaacacatgtatagcttatggagttattattacagccaccacccagaccaagaaatagaactttgccaatgtccctgttgtccctgggaagcacctcctgggtttccttctagtctgaactgccaccttccctgcaaaaatgaccctcacatgacttttacagtaacctcttttctgtctttctttatgtttttgtcagagttttttgaaccagagcaactccatcttgaataggggctgggtaaaatgaggctaagacttacttggctgtgttcccagatggtaagggcattctaagtcacaggatgagataggaggtcagcacaagatacaggttataaagaccttgctgataaaacaggtcgcaataaagaagccagccaaaacccaccaaatccaagatggcaatgagagtgacctctggtcgtcctcactgctacactcccaccagcgccatgacagtttacaaatgccatagcaacgcaggaagttaccctatatggtctaaaaagggaaggcatgaataatccaccccttgtttagcatgtcatcaagaaataactataaaaacgggcaattagcagcccttggggctgctcttgtctagggagttgccattctttattcctttactttcttaataaacttgcttttgctttgcactgtggactcgccctgaattctttcttgcacgagatccaagaaccctctcttggggtctagatcaggaccccctttctggtaacatctttcatcacctaagtgtgccttccaagacatatgatgtagttttgccattttaaaaaaatgcgatctatcgtttgagtctctttcaatccacaggtttcctcccacttcttttctttacaatttctctatcgaggaaccaaagccttttgatccacagagttcctactgtcgggattctgctgattgatactcttggtgcagttcaagatgttcttccctatttcctgcaaattggcagatggatccagaagttggatcacactcaccttctgtccttttggcaggaccagaggtgctgcattccttcgttaggaggcacataatatccggtttgcctctctttgtgtgatgctaacagctgttgcagcacaatgcttagctctgttaattcactaggggtttcaaaatggtgatattctaattctgtcacttcctcacatattaacttgagtacttttaaaaagagatgcttccagtcgtccaccatttgcttacccagtggtacagttcacatattaaacagaggcaggataaatgtgcgattctttcctcattatttacctgtttttcagagagtgaatttgttcctcatcctctgaaggtgacaatgttttaagtagtttcataaattgaagatttaaacatattttatgggtttttatccatcacaattatcgtctttactgatgctcaaatggctctatgtttggccagtgggagccccttgcagatggttcccgtgtccttttgatatgatcttttagtctctgatagcctccttgctatccagcatgacaagatgtccaggcttatcttacacatttcctgttctagacctgcaatcagccatttttccaagaagtcctggtttcaatcagtagagaatctatctatctatctatctatctatctatctatctatctatctatctatctatcttctatccatctatcatctatctgtttatctatctttttaaaaaagaaaaaatgtcaaaagagtgagaagacaagccacagactgcaagaaagtatttcaaaagatcccagcactttaggaggacaaggcaggtgaatcatctgaagtcaggagttcgggaccagcctggccaacatggtgaaaccccatctctactaaaaatacaaaaattagccgggcatggtggcatgtgcctgtaatctcagctatttgggaggctgaggcacgagaattgcttgaaccctggaggcagaggctacagtgagccgagatcccgccactgcactccagcctgggtgacagggtaaaactctgtctcaaaaaaaaatttttttttcaaaagatatatccaatagagaactgctaaccaaaatatacaaagaaatgagctatcaagccatgaaaagacatggaagaaacttaaatgcatattgctacgtatacggagccaatctgaaaatgctgcatactatatgattccaactctatgacattctggagaaggcaaaagtgtggagacagtaaaaaactcagtggttgccaggggtttgtggggagggaggaatgaatcagcagaacacagaggatatttagggcagtgcaactattctgtgcaatactgtaatgacggatgcatgtcattatatatttgtcgaaattcacagacaataagagtgaaccataatgtaaactatgaactttggttgatgttggtcaatgttggtacatcaattgcagcagacgtaccacaacgatctggagtactgatggtggaggaggctgtatgtgcctatgggaagggggtatatgggaactctctgtactgtccacttaattttactgtgaacctaaaactgctctaaaaataaattctattaagaaataaatgtaaaatgtctcatatgtctatattgattcttccaattcaaatgtagaattattgggtgctggtcgggcacagtggctcactcctgtaatcccagcactttgggaggttgaggagggaggatttcttgatcccaagagttctattgcgaccagcaaacatagcaaaatgtccatctctatgaaaaaaaaaattaagaattattggaggttgggtggagtgactcatgcctataatcccagtactttgggaagctgaggtaagagggctgcttgagcccgggagttcaagaccaacctgggcaacatagtgagactccatctctacctgaaaaaaaatttgtaaaggaattattggatgtttacttaaattctttcttattcctgaactcctttttctcaccaaaaaaaatcctagttctcaaaggcccaggagatgacagaattgaaatacacaagaattacttatttcctttatcccatattacacacacagcattcttagtataaaatgccaatactacttccatcaacatcattattgaaaacagttaaaatttttttattatgctttttttctgcatgcatttcttattctcttatccctcaatttataaataactgtactatatctatattgtcagagaatatagccattatatactatgcttttttaaaattttcacttattcttaattctgtaaattatatatttaatgttcaccaccttatgttgatgtctctctagacactttgtttctctgaagttcattctctagtgaattcctcaggaaggaatcatgggaacaatatttcctgaactgttacatactgataagtttgtttgtaccctttatacttgaaagtcagtttccctgaatataagatccttggctcacattttattttcttgagttatttaaatatgttactcaattttcttctggcacaaatgttgcagtcaaaaagttgatgataatccaatttccaatcccttacaaatcatgggctatttttgcttagacactcaaaagatttttcttttcctttgaagttctatcatttcactaaattcatgccttggtgttagtcattctgggtcagtactctcaggaacatggtgtgacttttcaatatgtagtttgaaaactttttatttctaaataacatagtacctttttgaactatagcttctagtatttgttctgatccctgctttgggtttttcttcagggaaccctgttctctgtatgttggatcctctttacccaacttcgagatttgtcactttctcctgaagcctttatatccttgctcatttcttagatttttaaaaatttccatttgtttcattttctgtttcttctgaggaattatctcttgtgtttattcactcttgcaatctttctaggttagtcttaatttctgaaacttttttcttttaaactcatttccccccctaaatttgttaatttctgagtttttctatttctgatttatgttgggtttttttgcatcttattttgtttaaataattgcttctagcttgtcttaaaacagtaggttatagttttttgttttgcaggcatatcttttggcatgtttttcattatctgtgaagatgttattctatttcttactctttttaaaaaaaaactgtatagagtaggactttgatctttgcctgctgctcatttttgtaaaggtgaaattaatttttctgaacttaaaaatggggttgagttcaagacagcttttataacttcacaaagctttctcttttgttgttttcatgcactgttaaaaaatatggcagcttattttattttatttttttagattcctggttcttataaaaatgtctctacttttatctggatactctgcttccttcccctctatcattcctgctctattcaattttgtttcctgtttcagcagtgtcttcttgatgtgcagccttgtcctggaaggatgacctggctggtcagtttcaagagttcacaggggctatgctactccatcctcttctcatctttttacatgaggccctttgtacttacacactaatggagtgagcaaaacccttcccgtttcagctcctgttgtgaagctggatctctgtactttccagtgaatgaatacctattgcctctttggggttactccttgtcttagtccattttatgttgctataacagaatattgagtaatttataaagaaaagaggtttatgtggctcatgattcttggggctggaaagttcaagatggagcagctgcatctgtgagggcctcatgctgcctcaactcttgcctaaaatggaagggaagtggggatgtgcacaaaaagatcacgtggcaagggggtaagcaagagggagagaaaccaaggaagccagactctttttgtcatcctgctctcattgtaactaatccattccctcatgagcaagaactcagtccctagagagggcattaatctactcatgactcaaacacctttcactgggccccacctcccaatgccaccacatagaggatccaatttcaacatgaattttggtggggacaaacaagtcacatccaaactgcagtttcctgttcttagagatgacaaacaccctgtttcttccctttgattccttctgtatgcatactaatactatgccagtttaataactgttagttacaaaataggcagtccctacccaccaatattttggtgttttaggggatgcattgcccactagttttattgtgagtgtttcccataggtttttggttttgctatctagtttgtctgttttttattagtggcatattcaaaatgatgcccctaacactgttgccatcttctcaaagacatcccaggaagaacttcaatattgacaatttaacatccttaaggaatgcgttgtaacaaccaaactggaggagaaaaagtatgtaaacagtagtttgcatagagtgtcttgtgctgattatgacactgtagcaggtcttgttgatggcttcccatatctgctcagcccacccgagctcaacctcaggaggcagttgtaatctcaagcacctacatctctcttcttctttaccagggactttccctggtaccatcaaagcttgccagcctgccttgtacttcctgagatcactcccaaacaagctgcctgaacccatgtgcttgtctcttgcctccttttgggggaacaagccaaggtagacaccaagttgtgttccaatagcctggcctgattcaagcatctctcatgtagtgtaatgatatggtttggctctgtgttcccacccaaatctcatgtcgaattgtaatccccactgtcggaggatgggcctggtaggaggtgactggatcatgggggtggtttctaatggtttagtaccatccccctagtgctgttttgtgatagagttttcatgagatccggttgtttaaaagtgtgtaacacctccctcttctctctcttcctcctgctcccaccaagtaagatgtgcctgcttcttcttccaccgtaattgtcagtttcctgaggcctccccagaagcagaagcctgtacaccctgcagacctgtgagctgttaaacctcttttctttatgaattacccattctcaggtagttctttatagcaatgtgagaacagactaatacatgccatctggttatgattttcaaaaatggaataatgttagctttatatatatatataaatgtgtgtgagtgtgtgtatgcatatatgtgtgtgtatatgtgtacatataaaatatatattatatatgtgcatatatatatatagagagagagagagagaaagagagagagagagatagggtctcactctgtcatccaggatggagagcagtgatgcaatcatagctcactgcagcctcaaaatcttgggctctagcaatcctcccacctcaccctcctgagtagctggaactactacaccacacctgactaatttttgtactttttgtagagacagggtctcactatgttgcccaagctgatctcaaactcctggcctcaagtgattgtcccatcttggcctcccaaaattctgggattacaggtacaagccactgtacctggcagcttaatatttttgatgacctttggtgagaaatctgtttagtctacataaattaaatgcttatctttccttgtctacaccctatttaattccctccagaggccctgattgattagtggcctgccccagacattgtctttcctaaatgctaggtttgttttccagaattcagcaatcttaccttctaattgcaggttctattttttttttttcttttctgagcacggaagtgagattgctttatctgtaggtgtcagggtatcctctgtgtttaacaaaatacgtgttgaatcattgtctccttggtttttatgactgagagtcttattataagtgaggccatgccaggtgagactaggtcagggcaaatgcgacctttgatgcctgattcccagcgcagacaactcagccaccttgttcatggctccatcccagtctgccttgcactctagttaaagtctgtctgtccctgtctgtctatctgtctgtctatctgtcttccagccttcctccttgagggtgagctgcattacccctttgcactgcccaccgcctgccccccacaacctgtcccttgcagttcctcagcaagaccttggctggacagtctgtgcctgaaggcagatggcccagacaccagtaaagggagctgggctttgcctccgagcctgcctccagctagggcttgggcttgggcaccatcttagcacatctgtaactggggctgagctggcccatgctgtgtccccctgaatcttgggacaaggcaccaatgcaggaacaggcgtgaagggtgcactcatcagagcccaagacatcactgcaacaagaatgcatacaggaagctctctctgaggacagggacgggggacggagtgtgacaggttccacactgcgatattcatggctgcctccgtgccatagggccccttgcatgatgtcaaaagaggagacttgcatcgtcttgttgttttcaagctaactttaaacacaactgacagcaagatgtctctggcacgaaagccaacagggaggcgactgtctctctgtttccatagctacagacaggacgccactgggcagtgctttcaactccagggcatcccaggctctgcctgagggatgaagtttcctgggtgctgggagaacccagccacaaaatggcagttgctggtctcagtttctgccccaaccaccttctatttttggtgagagagtatcatttttccagatgtccaagggtgtccattcagaacacacttctgcagccaggaatctgggaaagccggagatgtctccataaaccttctgcaggccatgccatctgctgaccttgacaccttctctgcactggaggacggcttagcaaagctggaaagggggtgtcccctgggagcctggctggctggctgtcacttgctgagccagggacagaaggagttgacagtacattttagtattacctgcttccaatttggaaaaaattttgtgcatctcggtttttccagtttctccttcacctctgtggacctgtaaaataaggatttgagcacatccctccaaagctaacttgtaaatttcctgttgcactgatatggttgggctgcttccccactcaaaatctcattttgaattgtaatctccataatccacacgtgtcaatggcaggaccaggtggaggtaattggctcatgggggcagtttccccccatgctgttctcgtgatagtgagcgagtctcacgagatctgacagttttataagcctctgatatttcccctgcttgcactcactccatcctgccgccctgtgaagaggtgccttccaccatgattgtaagtttcctgaagcctaccccgctatgcggaactgggaattaattaaacctttttcctttataaattaccccatcttgggtatttcttcatagcagggtgagaacggactaatacatgcgtcttcccgcaggagagtggatggcagaggcttaccttcaggggcccaggtcgggtgctggacatggggctggcattccaggtctgctgctctcggatgtccctctgaggggcatcctgcctgatgggtgggctccccctgatcttgtctccttggatgcatcatctgtgaggcttttgttttcagtcccagtggagagattcatactgccaggcactgtgtgggctcctgtgcgttgtgaaaataacgcttattcaggactgcctagggaagaaaggccatacctgctgctgtttttccatctctgctgtggccgcccacatggtttacggcacaacttgcctatgccaaaagggactgagaaaacctggaaacctaccaactacatttgggagatttttttttttttttttttttttttagaatgtctgtctcgggcaggcaataactagtaccgagcttggtgacccttttgctttctagctctgggggtgcagatctgagcctcctccagaatgcagtccccctagcctggctatgacactaccactggtgtgtccttgatgccacatttctaagcccatctgatcataaacctccctggggcagggaagtctcagagtgcacttcctcacctaacggcatgcctccagtggcatctgataaatgcttctgcagtgttcctggggaaacagttttattcatttcaaagtaatcctttctttcttctcaaaatctccaaacccaatccttaaaaccaagcattacatttagaatagaattcaagtttggattttaaaaaatgcttttaagtacgtcaggaactcagaagatacttaagcccaactttcctaccacatgatggaaagacacttggaaaggacagaagagttttgttgttgttgttgttgttgttttgagatgaagtcttgctctgttgcccaggctgtagtgcactggcatgacctcagctcactgcaacctccgcctccccagttcaagcgattctcctgcctcagcctccagagcagctgggactacaggtacgtgccaccatgcccggctaattttctgtatttttagtagagatggggtttcacagtgttagccaggatggtctcaatctcctgatctcgtgatctgcccgcctcagcctcccaattctgagattacaggtgtgagccatcgtgtccggccaggacaggagttttgaaaatgcactctgggctctgattctggaaaggagatcctgacttcagaggccctgctgccctactcagactccagaaggttgagtaaagttgagcaagctacagccactctgctctgggaagccagtagcaagtgctgagcctggacaatttgaactaagccagagagctctccaaattagggagcatttaaatagaagtgctgtttatttaggtcatatagtaatttccttattttaatcgctaccccagttaatgactaacaacatataaccaaacaaggttagcccagccaacttgactgaatagagagaactatttataatgagctcattcgtatctgaatgcagatagatgcacagaaggactccaatgttaatagaagtcaaaatccatttactgtacaaggtgggggagatgttccccctgcaagcctattcccactgcctttgactgacagtaaaaaagtaaacttcagcctggccgtgtatgacgtgagtgctgaattagtttggttccaattaaataggatttactgaattgtgacatggacatattctagaattttaaactctttaccccaaaagtaaaaagaagaatctctactatttctgtcaagagcgtcttagaccccctcctgcagttcatcatcaccttagacagtgtccttcgccccaccacgggcaggcctggagaaggagccccgccactggaggatcatccgtctcaaggatacttgggaactgaaggagtgaccaggagcaggcagtccagtggagatcttttttttttaattaagaagcatcaaaatgaacttgagtttggcaagacctcaatagagtagccaagctggctccaagcctggtttgcatggaggggctggacttggcttgggcatggctctgtcttgggctctggggtcagcaaagccccctgcaggcctgcccacctcaggctgtggggagcgcatcagggccaccaaggcagtgagtggtctgcagctctagggatggcgacccatcctagagagccaacagctgcccccagagtactcgaaccttattccctggttcctgccttcttccctcctgggtactcagcgcctctctgctctgttggattccccagtgtccttttaagaaagtctggcagggcatggtggctcatgcctatcatcccaacacttttgggaggccaagcaggaagatgactcaagcctaggagttcgagaccagcctaggtagcacagtgagaccctgtctctacagaaaataaaaaataaaaaattagttggccatggtggtgcacacctgtgttcccagctactcaggagaacgaggtgggaggaccctttgagcccaggagtttgaggttgcagtgagctagggtcatgccactgcactccagcctgggtgatagagtgagattctgtctcagaaaaataaagtctcccctttctttgcaagttagtcatagtttctgttgtgcactctctagaaaaccacatctgttcaccaactctcttctgtgttaaggactggtgtcactttagcctgccccagaaaaacttctctttaaagagaaactattcctttttttttttttttttttttcagacggagtcttgctctgttacccaggctggagtgcagtggcgccatctcagctcgctgcaacctccacctcctgggttcaagcaattctcctgcctcagcctccccagtagctgggattataggcgtgcaccatcacgcctggctaatttttgtgtttttagtagagatggggtttcaccatgttggccaggctggtgttgaactcctgaccttgtgatctgcccttctctgcctcccaaagtgctgggattacaggcgtgagccaccatacccagccaagagaaaccattcttataccctgaggaatgatggtgaaatttcgaaattgtgacaggtatatggggttcagggatgcccagaacccccagcaatgttgcttatgcaggggatacccacccaggcatattgacatcaggaaatttcagacaactcaactcagaaggaaacaaagtgaccctccagctccttgaaaacccaagaggtgacagaaaaggggaaaggagagaggaggaaaaggcctgggaaggaacattcatcccataaggtggccaagggataccttggctggaaatgagtctgggccacgttccctggtgaggaacttttaggaatcatggaattgcacagcaggccttcagatcctgggcccccatccctcatctttcgaatggggaggtcgaggcctggggagggaaggcatggcccggagcccacacaggccccagagagcagctgaggaaggcaggtccgttcccaggaggagtctcccgcctggatggcactctgatcagcacgtcactggcctgtctgtgtgttgaactgacttcaggaagccttggggtcacaatattgcagaggccattacagggccagatgttggacgtggaagcaaggccaggccacgtcataccctgaggtgactagtctgtgggtggctaagggcagtctggtcacaggactccaattcccaaaatgccatgacacccttcacctttcctctgcagggacagtctattgtctctgcatacagggaacaggctctgaggggttaggagacaagttcaagaccccctagctggcacctgggagagctgaagcagacctcctggcccatcccatcattcccttcttcctcccatgggatgcagggagacagatgaggtgttcccgacctgccagtatagatggctcccaaactcctctgtggaacaagtcttcttcttcttcttcttcttcctcgtcttcttcttcttcttcttcttcttcttcttcttcttcttcttcttcttcttcttcttcttcttcttcttcttcctcttcttctcctcctccttctttttcctcttcttcctcttcttttcttcttcttcttcttcttcctcttcttcctcttcttcctcctcttcctcctcttcctcctcttcttcctcttcttcctcttctcttcttcttcttcttcttcttcttcttcttcttcttcttctccttctccttctccttcttcttttttttttaatagagtctcacgctgtcacccaggctggagtgcagtggcacaatctcagctcactgcaacttctgcctcccagattcaagtgattctcctgcctcagcttcctgagtagctggggctacaggtgagcaccaccatgccctgctaacttttgtatttttagtagagatggggttttgctatgttggccaggctggtctcaaactcctagcctcaagtgatctgcccacctcagcctcccaaagtgctggaattacaggcatgagccaccatgcccagcctgttctggttcctctcatggcaacagatggaaggttcaggactcaagactcagtcttgccaaacacaatgtgagacagtctcagcttcccactgtgccaccttcagcctccagcccaaagacgggcaggaaccttcacttgcaggaacggcctgaggaaagggagcccagagccagtggaggcgggggtctgcctgcgtcccagagccaagccccctcctctttcctgtatccttgttgcagcaaacagattggcacctgaacctctctattagcccttctggggcttaggctgtgggcgcatggggccatgcactaaaaatgtctttcaccttagttgggatgcaaagagacaagtttgccactaatctttcggtggagacacacatatcaaaaatcgcaagtgagcacacaaggcttcctgcagggaattgcagccttcctgctcctccctcgctgcagaggctgagcctgactttcaaaaaagggcacgcagcccttggcaaatctcggaggaaaactcactgcgagttggtgccaggggcctcaggccccctttggggatttcccccatggcctctcaaaacaagaaggaagtctgagttaaaaatggaaaatggagagaatgtcaaaggaatgcagcgttattgattcctagtggtgtctgcctgaatattagatgcaaataagtgctaataagtacagttgggaaagctaatggaaaaaccatccttcccaggaggatcgcggcacacagatgcacagtgttgctgagatggcttggctcgctccactcactggtcacggcaaagcctgtatagatgcatcccagggaaataaagcctgtgtagacttgtcgcatggaagtactcatggtccagagccccctttccagctttgaggctgggctctggaaatgggagctcctattatctccccattgcagttaagtctctctttctctctccgtgtgtgtgcatgtgtgtgtgtgtgtgcatgcatttgccctctggagtgttcatggtactgaagagattctcttgaccatcaggcctctgtggcaaaagttgtgtgctctgttccaggcctaactgcagacagggagctcatgggcagctgcccagccaagctatggtcaggaccttgggtggcaagaggggctgcaagtgtggggtaaggggaccacagggacagggatggggtcattgcactgtgagctagtccggcaagtgactttttgctcactccactctcccctctctttgttcctaccttctctcctgctctgctccaacagctttgggatgtaggatgaataagggttccactgccctgtttttcctgacacttgagtccctggcccttgcactcagctcctccaatctgcacctgactgaggcggaggagggtgatttcagacacacacacacacacacacacacacacacattcccctcatgcgtgcagccagtggagtgtgcctgggtcccagcgcagccccaggcctgggtcactccgagcctaaagtcctggaaagggaaccccagaacaaagcctatcccagtttggaatcatcacacctgggccattctccagatgcgtggagtccagcaaaatggtggcatttttgcatctcaattcgctcatctgtaatacgggagtgataatgtctactctgttgctgcaagaattaaaggaagaccatgatctctttgtcatgcttctatttatcttcttatctgtcctggtctatttttggatgctctgagcttacctggggcattaaggaggcctcatggccctggggctgaggggctccctggccgtccccaggagtggctctgctctccgcctggtgtcccccactctggtcagtcaagacccatgggcccagctcactccccaattccatcactcactctaggtcagctggtaggagtcaggccaaccagccagcaggtaccattagagaggagagagtaagggtctttcactttattaaaggcttctctgctgttgtttgaaaatactgagtgtcccttcaagactaacaggtgactgtgtgcacagtttcctccagctcctgtgagaaagcagttgccccccttcccaaggcctgcttgtcccctgcaggctggggctgcctcttcttaggaagaacaaggacccgaatccagggccccgtgttcctgtccctactctgtcccggtgctgtgtggccgtgggccggttccaccctccacgctgttttcccgagtgtgtatgaagagggtcggttggccccgctctcaggctggtgacccgacacaaacttccaggatgaagtcctgaagggagcacctgttcgcagggcactttcagcagaatctagagccccagggatttgaggatggatgcggacacccgggcctgaggcagctcgcggccttgaccgaattccacgcgagctgaagcccagggatatcccagaatcttcctcaggatcaatcttccgcctttcaccggccctgcgcccccgcagcatcgggtcctgggcgcgcgcccctgccccgctgtggtcaaggcccgccccggtgacgcctggtccttttcccgggttggcgccgcgtgcgacccaccgaggcagtggcagcactggccgcggtctggagcctagcgtcaggccggagtccggctctcctgaaccgggagaccggcgcagccccagccacgaccgctcccacccccgcggccgccggaccgcgcccagcagcgactctttctgagagcgctgccagaggggccgcgggagccgcagagcgcgcgtgggcgcggcgcccgcgagcccccgggagggccgagtgcatcgctggagcgatccccgcccggcccggccaccgccgtagccgccaccacggcggggcggggcacgggccgggggcggggcgccgggcgggcgcggcgctatttccagcctcgccggaggcttcgctctcacttcgctgggagccttcccggcgcgcaagccggatccggcagtgctgcggggaggagagaggacgaggcggcggcggcagcaggaggtgggggaccgatcgcgccgggggccgaagaggaacgccgccccgcgccctctcgctccccgcacgctccggctgccggccccacgctgctcgcccacagatcgcactgggttccgcttggagcgggcggaggcaccgggcccgagctgggtcggaggtcctctccgccgcctgcgcgccccaagcagaggatccgccgcggagaaccgctcccggactggaggcgcccgcggcctcgggtgcgtccgctgcgccaggtaagtggctgcgcccctgccccacccctgttcccgccctgcgcaggctcctggcctgcagagacgccaggaaggggtcccgagcgggccccggactgcaccgctcgccatccccgccaccgcacgcgaatgggagtccgaagctgcgggcggaggtgggcgcgcggggctcgggtctggttgcactttggggaccggccccggtagcgggaactttaattagactttctctccttggatctcactcgctgccgcgcttctgggaactgccgtccctcgggccctcttggtccctgcggactcccgctccgcctcctggccctcggtgctgcccgcggggaggcggcgtcgggcgctgagcagcgagcgccgagggccaggcaggagcgctcggggcgctggggcttcctggcgcgctcggagccggggctccggacgggttgcggcgggcagagactatgggggaagtttaagtggccttggcttcctacccagcggctccgtcgcgcgcgtccccgacccgcaactctccagggcaccggcctgtgagtgctggaggcgagtgtgcgtgcgtcagcgatggtgtgaaggtgtgtgcgtgcgtgtgtcgggagtgcgggagtcggagcctggggcggctccagggggcggggaaatgatccgtttggccgcgggaccgagccgagctctgacggcggctgcaactccggctaccgactctgcagacccgctctggcctcgctggaggccagccgggccaggagggcgatcacgggttttggcagtgcccgatgctggggcttgggtctgatgtgaccccgattccttctccagtgcgggactcccgccgccctaactttcgcgtacatcttgtctccaggcccgcgaccccgacccggagttgaagcggctgcggcgccctcggctgtgggcgctgctgcccggctgtctgttttaacccagaagtaggcgccgatcctggggctctctgtcctgcagtcgtctccggcgtcccagaggactctgcgtccctgggccactcccgctggctcaggagccgtgatcagctccgttaaggggaacgcgcgtcccggcccctctccatctgcttggcgcgatctggcgcagcagcagagcacgtgggagaggcgttgggtgcagggaggtagtagctgctttggagtggatggtggagaggggcgggggacagaggggtaagaggcagatcaacccccttttatttcccaccgccgcccaaggcccccaggagctacaataccaagcccactttcctgggtaacctttctcttctgagttcaccttgacccttgcctacctgtggggaagtctttccctaagtcctgccctaggacagggcacccgtggagcaggtgtggcagagcccttaacattttccagctgtcatgacctttcctgcccaccctgtgccctgtcccaaaggcaaggcagacaggccacaggaaggacactcatcccagcaggagatcctcttttaattttaatcaggacaccccaagcacagaaggcggcgtgggagttcattcaggagcgttcagcagactggcctctgtgaagtgacccacgggaggaataacattggaaccctgaagagagggacctcttgagggtctgaatgttggttccagtgggactggctgatcaattatccaatagcatttgaacacagaaaaacctcaaagccggaacctgacccattgcctggcccagtcgccctgggacacacaaacagtgcagctcatttatttacttatttatttattaacctggaatcagactcggcaagagtgaattatgtttcccgggtattgatttttaaaaagaccccaaattaaaaagtcaaggctttcttaaagcaaggtcaaggattaattatttatcgagaggcatccatcaggcagcgtgggggctcatttataaattgcctgagcaggcaaaatgagcatcttttgattttccttggctccagttgggagaggagagcaggctcgtctgacctcctgggcttggtagaacatccccctcggactgtaaccgacgacagaggatgctttgtaactcagcctgctgttagagatgcctttataatcttgtagccagaatatcacttgggaaatttcatgcatatttgctgtgtttccataatgaacatttactgattacagggtatccagggaatttcattttttaaacatttattcaaatctctgtttatgtaagctaataagtctgggaaagttcaaaaacgacttttttgccgtatggttgttgagaaagtgtgtctggtgggctactctcagaatttgtcttcagttctcttaaaaaggggagagtcagatttgcctgattggaaacctcgcgcaggctgctcccctgctctgagctctgagttcctgccagaggcagcctgataggctttttgtggttttgctgatggaagagaggaaggggagctttgatcattgctgatgcgtctggctggagaaatttttagtgagtgcggctgtgcttgtaggggctgatggggaaggtgtggcccaagctgaggtccctggctgatgtccccatctcctgcctgctgcctggcctggaatctgagatccctgtcttagctacatctgctgctttgcagcttggaaaaacctccctccctgatttactggtgcgtggcagccacactggagaaacgtggggcagcggggaacctgtgagcaggaaagaggacacaggattatggcagctttctttctttcttttttttttttttgagataaagtttcactcttgttgcccaggctagagtgcaatgttgcgatctctgtttgccacaagctctgcctcctgggttcaagcaattctcctgcctcagcctcccgagtagctgggattacaggcatgcgccaccactcccggctaattttgtatttagtagagacagggtttcaccatattggccaggatggtctcgatctcctgacctcgtgatccgcccaccttggcctcccagagtgttgggattacaggcgtgagctaccgcgccccgcatggctgctctttagtgagcaaccgtggcaattagagccgataaacaccatgtggaatgagtggccagcctttcagctaaccagaaggtgacgagttataaactggagatttatatagtgctggcccaaggagatcaatgtgacccggcagtggcacagcaaaaaatgaaataaataagtaaatatgtttttaaaagatcggccaggcacggtggctcacgcctgtaatcccagcactttgggaggccgaggtgggtggatcacttgaggtcaggagtttgagaccagcctgacctacgtggtgaaacccagtctctactaaaaagacaaaaattagccgggcatggtggtgctcacctgtagtcccagctactcaggaggctgaggcaggagaatcacttgaacctgggagacagaagttgcagtgagccgagatcatgcccctgcactccagcctaggcgacaaagcgagactgtctcaaaataaatttttttttttaaattgaggttggtgcctggatgtagatatggcatcagtgtcctgcaacctcagaaagttggctgggcatgagcaatctgcatggtgacagcgtggtgacagtaggctgtttggtgctgtctttggcgccatattcagggctcatctgactccagagcggctgtgttccctccagaggaaacccacggacccagacaacccggggacagagctgcattagctcaggtgccagaggatgcggcagacgccatctcatttcttatcagctggaggatgtgtgaccctgtggtcagtaaatcagcatggcagatcgtgaggcttacaaattggtcatggaaaaaagttgtgacttttaccctgtacaaaactacctgtcatttgtgatgtggtgttctagcctgcactggctggattcattcccggacccttagaaactcagcaatgcagcctgggccaccgagagactggggaagcctccgtgcaggtgggttgacaccaagaagcagccctggccccattgccaaagccaccttttaggaagtcagagagtatctgtgcaataatttggatgtttgtcccctgtgaatcttaccttgaaatgtgatccccagtgttagaggtggggcctggtgggaggtaggtcatgggggtggcccctttatgaatagattaatgctattgtgaggcagggagtgagttcttgctctattagttcccacaagagctggttgttaaaaagagcctagcacctaccccctacctctgtgatctcggcacacaccggctcctcttctccttccattttaagtggaagggcacgaggccctcaccagatgcaaatgcaggtgccatgcttcttgtacaggctgcagaattgtgagccaaataagccgctttttttttccttttttttttttttttctttttagagacagagtctcgctctattgcccaggctggagtacagtggtgctatcataactcactgcagccttgaacttccaggctcaaacaatcctcctgcttcagcctcttgagtagctgggactacagatgcacaccaccatgtccattaatttttaatttttttttatagagatggggtctccctatgttgtccaagctcatcttgaacttcttgcctcaagcaatccttctgcctcagtctcctaaagtgctgggattgcagatgtgagccagcatgcctgtcctctttttttggggggggggcgggtggggtgacggagtctcgctctgttacccagcctggagtgtacagtggtgtgatctcggctcactgcaacctctgtctcccaggttcaagcagtcctcccacctcagcctcccaagtagctaggattacaggcatgcaccaccatgcccagctaatttttttttttttttaatatttttagtagagatggggtttcaccatgttggcctggctggtctcgaactcctgacctcaagtgatctgcccatctcgggctcccaaagtgctgggtttataggcgtgagccagcacgcccgaccctttttctttatatattacctagccttagggattcctttacagcaacagaaatggactaagacagtccgtatgcaggcctggggctgggggcagcagacacagctgtcctcccaggttggtggcctgggtcttacatccgcactccgcacgtagaacaccatacatttctgggaaatagtatttcttggtgctggtgactgagggcaagatgccctttccctgccaagccatgaccagtgttggccctgatgagtgacatttatttgaactaaattagaatcatcaacgttgaaacctggagccaaatgattctcagtcccacactcctggtgccaggcctgttgtcactgtccctcgccctgcccctgcatgtttatggagcaggtattaggtgtcttgcactgtaccaggccctgtggacatgaggtgagcaaagctaagggtggtccctgcccttgtgagttagatggagaccctcctcatttattcctcattcactaattcattttctgccagacaaagacattaataaaaaaaatgactaatgtgtgattctaggctgtgataaggatataaagaatataaggaaataaacactcaggtactatgagacctaccaaagagcaatctgacctgcactgagaggttaggaggacttctcggaggaggtggcccttcagctgcggtctgaaggaggagtgggaactaagcagggttggtggggagtgtgggaggaaaggatggggagagagaatccagcatgccaggcaggcacaggcaagagcatgcaaagggcttcctgtggagggaatgtgtgagagggcatgaggagcaccatctgggagctgtgggaaggcccatgtcgccagcagagtgaagaagcaggtgacatgtggctggagacccatctgtgcagggtcttcacaaccagggagggacttgggactttatcctatgaactgctgcagagtaggaagaccagcgaggctggagctgcaggaatcttgcagaaagaccactgtggccttaaataggagtgaatgggcttcccctcagacattggtctggtccatcaggctctgtctcctggagccggggtggttgagcctaatgtgcaatggagtctgtctacactggttgaaaccagtgtgtgatgtaggcagtgcatctacgctggttgaaactagtgggcggtgtaggcggtgcgtctacgctggttgagctagtgcacaaagcaggcactgtaacactggttgagcccctagttcatgatgcaggccatctgtttatactggtggatctcagcacaccattcacgccatctgtctacactggtcgaaccagtgcattctgcaagtcattctgtctaaactggtacctggctggattaggtgtgggaggggatgtggtaaggagtggtcaggatggttacccatgggacgctattgggagttgtctactccctgagacagggctgccccctggagtgctaagcacctgtccactctggctgagtcacatcctcctaggactgggtggccaggctgctggttgtgtggccccactgtgctctgagcccttggttcttccactgccttcctctcttgtctgctcaccattcagccctagcacgtccagggcactcggcaagtgacagcccagtgcccatagctccatggtggggacaagctgctcgacggccagacccatggtcctggcccaacttttgcctcctgactcattgaggatgggcctccactgggggaatggagctgaccacccactgtggctcggatgcccacttccctccggagctgagtgctgcccagtggtggtctccatgtgtgtttcatccacttagcttcctggacccctagagttccttcacctgccacctgcctgatgtaacctggcagctggctggcacctgccccagaaagaatcctctcttatacccttttcttgctctcagccctctctccttttcctcctccccaagggagccagtctctacctgttgcaccctctgggaggggctctgcccaaggctgggagctccgcagtgccctctgatgttggtgaatttcctgtggctgtctgcagcacaggtcgggccctgggttccctgcagacatcggccctatctaccaggctctgtcctccagagctggggagcagggaagcaggtctgtgagtcaccccatttcccgttgtgcccatgctgctggctgcaggccctgagctgagtggccaccgagctgcaggcaacagcccaggtcgctgtcaccttgtcctcactgtctgggcctgagccagctcctccctgactgggccagactcggggacaggagggaagagagctaagcagaggatgctaggagctgcacattactccttggtcccctaggccccctcccagggctgattccttgcccagagggcggcctctccagatgagccttcctgggctggcctggccactccattctgtctgttgccttcaccactgtggacccctggacatgcccagatgcttatcagtgggaagctgacacaggagagcccctctgccagcagcccctagcccgggcacagactgactcgcacttggcagacaagtcgtccccaccttcgaggctgcctttttgggggctgactcatctcttgggacaagactcatcagcctaggcttgcagcactgagaccctcctccagccttgagctgcaggagctttgcttcctgtgccgcatccaggcacccagcaaacactgaccctgacctgccatatgcagagcctcgtacacctggccctggagaagttgagcaaacacaagcaggttacagtgttggtgcagatgctgctctttctggttgtgttggccaggaggagctcggcatggagaaggtactgagcgattgcttgtgggcaggcagagtgcattaaactgtgcagtctgtctacttcagcatagccggtgcgtggggaaggcagtctgtctacactggctgggccagtgtgtggtgcaggcagtctgtctacactggtggggccagtgcatggggcaggcagtccgcctacactgacggagccagcacgtgggtcaggcagtctgtccacactggtggggccagtgcgtggggaaggcagtctgtctacactggctgggccagtgtgtggtgcaggcagtctgtctacactggtggggccagtgcatggggcaagcagtccgtctacgatgacggagccagcacgtgggtcaggcagtctgtctacactggtggggccagtgcgtggtacaggcagtctgtctaactgacggagccagtgcatgggtcaggcagtctatctacactggctaagacagagtgtggggcaggcagtctgtctacacttggttgagtctagggcatgagcactagaacattccatgtagtctgtgcttgccccactctctgtggggtctttgcacaaggttcagagctctcaaactctgtagattcagtggcttttcctgtggctgagctcagcctgggtccgggcttcccctcagatgttggccacgtccatcaggctctgtctcccagagctggggtggtcaagcccagtgtgcaatgcagtctgtctacactagttggaatcagtatgtgatataggcaggctgtctacactgattgagccagtgcaaaaagccggcgctgtctatgctggttgggctcagcatgtgattcagcaatctgcccacacaggttgagctggggcagccagcctctctctggcttgctgaggccagagctcttggttctttctgacaccttccctttttcctatgtgattctttctcccgggaatattcctccttacacctcctatagacatctgggtctgatttgattctgacttccaaagactcagctttcgtgtgtctgtttgaatctccttggcagaggctgacatgggctgggagtggcactgggatcgcacgtggatttcccctccctgttgctgtgcctggggctgggcctgtgctggtgcagaggctacctgctgtcagtggtcatcactaccttgccatccctcgcgacagccactcacacgcctctttctcacaaaagtcatttagcgaggattaccaccttggtgtgcgtggtaaattgcatttctcctggttggggccatcttgctgtttcctgcttagatttggggcctcatgaggtttggcctcatctgcaaatttaatttcatgaccattcatccctgtgaaagcacaatctatgcctattatttcactcttcttgattccctcttccacgagttaatgtgtcagcgcacagccatggcaaccactccccgccctccctccaccccaggcagccacctctaggttgcggctgaagctgggacctggagtcagaccacctgggttcaatcctagccttaccactcggtcactgtgtgggctagggacccagtttcctcatccacaaaacggggttaacaagagaatccacctcctagagctgttgtgcctaagagtccacaatcagtggcagctgctactgctattattactattattattactactcccgttttatcttgggtgtcaggaagcatattggtcaagggccttgcctggtgatgtgacagaggcttagggggcaggcagccccactggccagtgtcccctcaagttctgctttttcttttcttgtctctctctctctctttttttttttttttttccagacagggtctccctctgtcacccaggctggagtgcagtggtgcgatctcagctcacagcaacctccatcccccgggctcaagtaatcctcccagctcagcctcccgagtagctggaactacaagctcccatcgccatgcctggctattgttgtttgtttgttttttggtatttttagtagagaaaaggttttgtcatgttgcctagtctagtcttgaactcctgagctcaagccatccacctgcctcggcctcccaaagtgctgggattacaggtgtgagctgccacacccagccaaatcatttttttctaagcagtttgctaatgatgtcttcttcttgtcctgcatgcaccattgtacatatttaagccttttattccaagtgtagtacacatacagaaaagcgaacagatcctacgtatacaatgcagtgaatgtctgcaaactgagtgtgctgtgtacccagcactggagcagggatcagaacatgaccaggaccccagaacccccccatgacctcttccagtcattcccctccaccacagaaaaccgctccccttacttctaacgatatggattggttttccttgtgtgtgtgtgtgtgtgtgtgtgtatgtgtgtgtgtttgagatacagtctcactctatcgcccaggctgaagtgtagtggtgcaatctcggctcactgcaacctccgcctcctgggttaaagtgatcctcctgcctcagcctcccgagtagctgggactacaggtgcatgccaccacacctggctaatttttgtgcctcagcctccctagtagctgggattacagacacgcaccaccacacccagctaatttttgtatttttagtagagacggggtttcaccatgttggccaggctggtcttgaactcctgacctcaggtgatccacccgcctcggtctcccaaagtgctgggattacaggcattagccaccacacctggccccttgtttttaaacttaatagaaatggaatcatgcagtatgtatgctcccatgtctgggtcagcatctggtttctgagattcatccatgttgttttgagttgtgttatttgttccttcctctttgtacaggattccatcatgtgggtagaccctaatttattttccagtttcttgttgattggcatttgggttagagtttttggcttttatggacagtattgctatggatattcttgtgtgtgtctcttagtgatatgtacacattttttccttttttagagacaggatcttgctctgtcatctaggccagagtgcagtggcgcaatcacagctcactgcagccttgaactcctgggctcatgccagcctcccgcctcagcctcccaagtagctgggaccacaggtgtgcaccaccatgctggctaattttttatttttatttttgtagagatgggggggtctcactttgttgcccaggctggtcctgaactcctgagctcaagtgatcctcctgccttggcctcccaaagtgttgggattacaggtgtgtgtcatcatgtccagttcctgcacattcctgatgtacttagaagagaattgttgggccccagggtgcaggtactgttgaacagttttctttttcgtgtgtgtgtgtgtgtgtgtgtgtgtgtgtgtgtgtgtgtttaagacaagatctcactctgttgcccaggttgtagggtagtgacgtgatcatggctcacggcagccttgacctcccacgttcaggtggtcctcctgcttcagcctcccaagtaactgggaccacaggtgtgcaccaccaccactcccagctttttgttttgttttgttttgttttggtattttttgtagagacagggtttccccatgttgtccaggctggtctcgaactcctgggcttaagcgatcctcccgccttggcctcccaaagtcctgggattacaggcatgagccaccactcccgactccattgctggactgttttctaaaggggtcgtactgatgtttccacctcctcaccagtatatgcatgagtgttccgtacgtaactctcccactccacgtcctgtccaatacttggcattgtgagtttttcccattttagccattctatgagtatgccgaggtatcacaccgtggttttaattttatttctcagatgacgaatgcagttcatttttttaccaaggatattttggacctggaaacattattcaacaaatttgaaaatttcctttcgtccccaaattgtagaactcacttccatccccacattgtggaaacgtctggcagtgcttctgatttcttctgggcgggtttgaatctcccaggctggaagccaagggatggagtagacaagagtttctctggatgagtctggggaactggccacctgccccagaatcacgtgggttgctggtcagagatgcaggtgctgagccctggcccagccccggactcatcagacagcccttgacccattggtccttctagggctgttttttttttttcttgtcacgaaaccaaaaaaaaaaaaaaaaaaaaaaaagcatggatgctgccctttctgtcatgtccacggctgtgtcacaatgcccagaatagtcctgcacagggcagacctgctgggttgaagggtttcccattgttgtctccatcctctcccaccccagctgacttggcggggactcgttagtcaactgggctgccgtggtgagggctctggaagttggtttctcgctcgctggggggtgtcccatgtctgaatgacctcctccttctccaaagccaacttccaacagagctgcagccgtgcccccagcagccttgctcacccccagtcctctaggcactggccatttgagagcctccttgggcgacctcctccctgatgatgcatgtgttattgggtccctctggagaagcttaggagccccctgatcccccgaaaagaacagcaatccatccctgcaccatgcggccccctgagcttttccaacaccgtcttttcatagatgatgtgcccttggtcaaactaaggcagaagggccattcctgtcatcagctgctccactcctgcccctcagcgttttcatgaagaccgtggtgaagcctcctttctttgggtgtggcttgcccctccctcctcaagtttagcagaactactgggaaagcaggatggcctgggggaggagagctctgggtcagaccctttgggtggttttgagacccagtcactgccacaagaggagggaggcagtttcgtatacacaaccctgacttagctagcagggagggagggcaagggatcctagctgggattcctcctgtaatgccagctctttgggaggcccaggcaggaggatctcttgagcccagaagttggaggctgcagtgagttatgatggcacctcctccacagaggagggaggcccaggctaggcctcaaagatgggtgggggggtgacaacacctcatggaccactcagcatgagctccgtccctgagggccagcagtggaaaaaatgcgggcttagttccccggagatactgcggtccagttgacccaccacacaagggcataaggcgatggtcagggttcactggagagctatggaaggcttcttggaggaggcgagctggggattgcttacctcaaaggccaggggtgagaactttatcttggtacagtggaaattctctccaagctttgggactacagtgcatggacagtgtgagccaactaccgtttgctttaaaatagggcaaaaatgaatccatggcgcacacattgtttatgcgatgtggaggcgggcgcgcaaagacggaagagctaaaagcagtttgggaaaaacaacacttttttttttttggtgggaagacagattagagaggtttatgcttttctgtgataactaatatgaaaggtttatcaaagttaaaaaaaaaaaaaaaacctcttgacgctttctccaaaattgatctgaagacttggcagatttgaggaatcattcagtaacgttttacgagtcgatgctaatttgatgcggcagacctgtgcatcgcgccaatttactgccaaaccaacattaagcacggacctctcgcgcaaggtttataggcagacagctcataaagatgcatgcttgacaagtattctgcttctcttaggatgtggaatatgaagtgtttatcaaaaaccacctaaatcgcccttgccttgactcgtaaacaacctggcggcttcaggcttgggccctatgcagtatttcacgtctcaccactacgggtcctggtatgtgcgtgagtgcctgagtctttgtctccagaagccacagttagaggtagaagtgttacaggaaaggggtcccgatccagaccccaagagagggttcttgggtctcgcacaagaaaaaattcgggcaagtacataccgtaaagtgaaagcaagtttattaagaaagtagtccgggcgcagtggctcacgcctgtaatcccagcactttcagaggccaaggcgggcggatcacctgagctcaggagttcgagacgagcccggctaacatggtgaaaccccatctctactaaaaatacaaaaattagccgggcatgggggctggcgcctataatcccagctactgaggagactgaggcaggagaatcgcttgaacccgggaggcgaaggttgcagtgagccgagatcgcgccattgcactccagcctgggcaacaagagcgaaactcagtctcaaaaaagaaagaaagtaaaggaataaaagaatggctactccatagacacagcagcccccaaccactgctggttgcccatttttatggttatttcttgatgatacgcaaaacaagggatggattgttcatgcctcccctttttagaccatagagggtaacttcctgatgttgccatggcatttgtaaactgtcatggtgcttgcgggattgtagctgtgaggtcgaccagaggtcactctcatcaccatcttggttttggtagcttttggctggcttctttactgcaacctgtttcatcagcaatgtctttatgacctgtatcttgtgctgacctcctatctcatcctgtgacttggaatgccttgaccatctgggaatgcagcccagtaggtctcagcctcattttacccagcccctattcaagatggagttgctctggctcacacgcctctgacagaaggatccctgtggggtgtgagatacctaaagaaaggttcgctttcttttttttttttttttgagacggagtctcgctctgtcacccaggctggagtgcagtggcgggatctcagctcactgcaagccccgccttctgggttcacgccattctcctgcctcagccttcccagcagctgggactacaggcgcacgctgccacacccggctaatttttggtatttttagtagagacgatgtttcaccctgttagccaggatggtctcgatctcatgaccttgtgatctgcctgcctcggcctcccaaagtgctgggattacaggcgtgagccaccgtgcccagtcgaaagtgaacctttcactgggtgtggtggctcacgcctgtaatcccagctctttgggaggcccaggcaggaggatcgcttgagtccagaagttcgaggctgcaatgagctatgatggcaccactggactccagcctgagcaagaccttatctcttaagaaaaaaaaaaaaaaaaagaaaggtcccaaagtgtaggatctgaagcagcatgccccctcttccaggaaggctcaaacatccccttcctaacagattctccaaggctgccctaaaaggaaataaaggctgcgcccaaatgagatctttggccccaaggagatagatttcttgctctcatgtttgtttcctgggcgactgtgtgatggatcttccctgcatagctctctccatccaaatatgctgtcagagcctcaccaatttcaggatatcactcgagctttgttttgctggtcggaaagtgtttaacaataaaaattatcaaaactcctgtctttcaccaccgaacaccaccgctgacgttttcctcaaaggaaaagtggacttgtgtggcattattctactgtatctgtgcctccagcccctccagcctcctcccatggcagtgttaattacccaagcttaaacgaagaaggttgcaggtgggggcaaagcatgcagaccgctgtcagcacaaagcctcgtgggttttcgcaaggggaaatttgatctcgggcaaatgtcaaggcgtttttgaaatctgtgttatgatatcagctcattgccagtgtaggacttcatctgaatttcataaatattgtatgggactccctcattgccaccttggccggccacagtgcacaacagccacccctcagcacacacacgctctccatagcaattgcaatctatcgctgagttgtcatgaaaagccaattggtgatatttcaatcacaatgttcttgtaaccaattccattcaaattctgtcggaaagggagttaaggcttcatcctgctgctgggagaatgatatgctaaatgtagcttcctggggccctggcagccagccagggctttgtaatttatagttcaccttcgtggttctccaagtgaccttggaacctgcatgctggtggattttttaggttcacacgttgtcctccatcccctggtgagattgctccccaagtgagtgctccctggtccatcaggcaagagcttgagggagaggatgtggatggggggcacccagagaatgcatggctggggatcagaagatttcttgttgctgctgacctttcttctaaaattgctgtcagccaggaaacagtcaaatattgtgcttaaaggtggcttgcaggtgacaggagcctctctccagtcctagcacacagcaggtgatcctgaccaaaaaaaaaaaaaaaaaaaaaaagaggaggtacaatatgcgattacgttcatcagctatttttggctgaggaataaacaaaatggcccaaactgctgccattcgagattctagcaggggagtggcatgtagaaaagattaatgtacagttaaaacccgtgtacgggtaaattacagggtgacagctatctaatgcaaacactgcagacgtgtaattaagaggagttacagcgctcgaggatgaatttgctgagggaagtgctagggtgctgtctggagcccaggggcaggggcatggcactgggatggtgtgggggctgcagaggtggccaggaggagcctctcagcatcggggcagccttgtaaccataacaggtccattgcctgatgcacgcagcaagtcaatgtgctaagatgccaggttgcggcagaaaaagaggattaatggtaaggtcatggaacgaggagatggcagacaacctcaaatccatctccctggggaatgtggggttaggatttgtaagttttggagtgggtgaagtgtggagatcgttgatgggtggaagagtgcagggtaaagtcttgggaccgggagaggaagaagctgtgttctcaggctgatccccctcctctgtagggggtcctcaaactgttgggggcaatttggggtcttttcaacatcttaagtgaacaaaaaccttatgattctaaaatcaggggtcctgtctatagggacaatggagaagcaaatcaaatttttttttttttttttgagacagagtctcactctgtctcccaggctggagtgcagtggcgcgatctcggcttactgcaacctccacctcccaggttcaagtgattctctggcctcagcctcccaagtagctgggactacaggcatgcgccaccatgcctggctaatttttttttgtagttttagtagagacagggtttcaccatgctggccaggctagtctcgaactcctgacctcgtgatccgcccacctcggcttcccaaagtgctggaattacaggcgtaagccactgcgcccagcaaagcaaatcaattcttacaccattttatgaccctaatgtcagaaatcttacctataggagcaatgggggtgaccacggccaggatctagcaccacgtgactccttgccacaaggaactgggccagagtgcagcctgattaatgcttaattataactatatttctgtccagaacctagcgtgcaattcttgccaaccctgtggggacagtttcaatctgggatgtggtggaagccatggctcctttgggtggctcagcccacctctccaggtctgtccgttcctgttccaagcttccagccctttctggagctgccctggtctccccgacctctcactcacctttggctctgtggccttgagagcccatggatgtcttttatgtttttaatttctcctgctttgtcagctttctaaggaatatattacattatgtggaagttggatgctaacaagatttgtatgaataaattagactcttaacttttttatgttattacaaaattgaaatggactctaatgacagtcggaattaatgttctgttgccaataaatgccggggatgtgactgaatcttcagcgcactctcctcttgcatctctggcccttcctgggtggtcttgcccaagaaggaacctccctcctccttccagcgaagtggggtgctccacgacgcctccctgctggcccctgggtgatggccaaggtgctgctctgcccaggtgtgggggctgctgggaatatctgctgctgatgctcccaggggcgccccgggatgggaactgccctgggccccagggagctccttgcccaaagtcacaccccatcccaccgccagggactgctactgctgtgggatcacaaaggcccagccccttgtctccatttgggactgccctgaaggtccctcccagcaccagagcacctatgggatgggctgagtcctcagctgagaggcactgctgtcggcttctctctctgcctgctcctgccctcctcagctcctcgcaggtggctgtcccgagagcccttccctacaaacctgtctgcaccgtccatcccagagcatccaggcaactcagcccaagatcctggctcttagggacttacctgttcctaaacccatggtaggctgggtgagtcctcttctgccaggatcagagtcctcggggaacaggattgctgtttctggcccgagaccccttcttgaggtcaggactgggggtgaggcactgaccagcttctcagtctcagcctagatctccgccccaccaccccctgggcagggtttgaggagcagcagggttaagggctcccccagatctgagctgccacacctcagcttgcggtgaggagttttctgcaaggaaacttctatctccccaggggggcaaggtggcacaccggctggggattggtggtgtattggaactggttcccatagctgaagatggaagggaagaagggggctggtaaagtagggagaaggagcctcagatagcccagaaatgagggggttctggacagcccagggtggaaaatttagctacccttggagtcaggcctcagggcaaaggaggggtatggtctgggatgtcgggggcggtgtgtggggaggggggacctgctgctttggaagggggcagtgggactcccgctgtcatcgcagaaagggatgagggtttccagggtggccaggtattcacatattcaagaacacaggtccatttttatatgaaatcgcttcccctctgaagtctggagactaattcagaatttaaaaccaaagtcctacgctgaccaaaccatatgtctgtatattactttggcctctgggcctgaagaatttggagtccagaacttcactgacaaggtggatgatttccgcctggaggatgagggcctggggcctagtgtctcaccagagccctggaaagggacaggaaccaccaagaccacaggccatggctgcagggctgtggggctcagcacccactgactgtggcctttgttctgggacatccctgtctgctgggaaggggccaaagccctcacctctgggactgcagatgggtgggcgactggctgggctctgtgtgcctctggagtctggcccactcccccaggaccccgtggatgagtgggcagcagagggcccccccccactccacctcccacttccaaggaatctgacctcagcattctagcttccaccttcataagtcttttttttttctttttttctgagatagggtctctgtcgcccaggctggagcgcagtggcacgatctcggctctttgcaacctctgcctcctgggttcaagcaattcttgtgcctcagcctccctagtagctgggattacagacacgcaccaccacactcggctgagttttgtatttttagtggagatggggtttcaccatgttggccaggctggtcttgaactcctgacctcaagtgatctgcctgcctcagcctcccaaagtgctgggattacaggcgtgagccactgcgcccagccaggagtcttaaagattccctgcggaaatgcctttgcaagagcaaaaagaagattaaagtcttaccgtcctttgaatccttctggctctggtgttggcatacattgtcccagagaaggggctaccttacgtctctatcgctttatatacgtaaactcgtaaatcattttcattttatcaaaatgcaataatctttatgcctaccgcacataacctgtttaatcactttgcatatcatgaattcttttccatggtgatgaatctgtttctgtcttgcttttgacacctacacggcatccctttccatgaatttatcataatttatagaaccggttccttgttggacattttgggggttttcgtttttgtttttcaattttaaagcatgttgacatgaaccttcttgcagtatacctttgtgccatcccagcataaattcctagaagtggaatagttgtctcaaagggtatgcccgtctttaaaacttttagtacttcccaacaaatcaccttccagaaagaccaagcggtgcgtgagcgggcctattttttctcataatcacaaccgcactgggaatctttgttttttattttttaaatctgtgtcaattagataggttaaagaggggcgtgattattgcctttttaacatacattttatttttaccaaagtcatgcatgtgcatagcttaagaaggcataaataataaaaaaaaggcttttaacaaatctaccagttctctgctccctccctccccagctctcctgagcccgtgttctggaggcagccacctatgactcttctagccatttccccagcaggcactgcagttctgcctccatatttctaaataacacacatatgccgcaggtgcgaaatggccagccagttgtaccagcatcatttatggaacattcactctttgcttgctgatttttaaatgccaccttgaccatttgcttaattcctgtgttaactagggcctcttctatactcttctgttctagcctgactcttctagtcccagcacccacgattttaattatcgtagcttaggagcgcatttctagtatcttaggaggcagatcccctctattatgattcttgtgtgatatcacatttttattattttggatgtagggcgtcacatttcaaataatatctagcgaagattagtgttaggatagtgtttcacttacacataaatttaggataagtttactatttatccttacaaataaggatacattgactcctttactttatttatttattaattttttattttttgaaacggagtctcgctctgtcacccaggctggagtgcagtggctcgatctcagcccactgcaacctccacctcctgggttcaagccattctcctgtctcagcttcccgagtagctgggactacaggcacctgccaccacacctggctaatttttgcatttttggtagagatgcggtttcaccatgttggccaggctagtctcgaactcctgacttcaggtgatccacccacctcagcctcccaaagtgctgggattacaggcatgagccagtgttcccagatttactgtatttattattattatactgggtcttctgagctgatccatgtactcaacaaatatttatggagaacaaagtgtgtgctgggtgcatgtcaggtactgttctaggcactgggggatacagcaggacgtgaagcagaggtgaatcccagcccccatggagtcagtgttctggtaagggcagcagacagtgaacactaatatacttaagtatatgatggccgggtgtggtggctcatgcctgtaattccagcactttgggaagccgaagcgggaggatccctcgaggccaggagtttgagacaagcctgggcaacatagcaagactccgtctctaaaaaaaaaaatttttttttaattagccaggcatggtggtgtgcacttgtagtcccagcaacttgagagtctgaggcgggaggatcagtcgattccaggaggtggaggctgcagtgagccatgactgtgccactgcactctagcctgggcaacggagcaagaccctgtctctaaaaaaataaaaaataaatgaattatgtagtgttagaatgtggcacttgctttaaaaagccaagtaggctaagagggattggaagtgtggggttagggaggaagggaagggtcaaggtgggcctccctgagaaggtgagatgagattagaggttgggaagatgtggaccatacagatggtctaggccagtggttctcagcctgggcgattgtattcccaggggaatttggcaacagctggagacatttttgatggtcatgactcaaggatgctcctggcatctggtggctacagcccagggacactgctaaacactctacagtctataggacagcccccatgacagaggaccatctgaccccaaatgtccgtagtgtggaggttgagaaattctgacctgggtgaagatgagtgtgggcagagagggcacccagtgaaaggaacggcgaggaagtcaggagttgggggacagggcccgctggagatgaggccgtgtgggggcgggggacagagatgtgggccctgcagaacagagtacagagtaggaaattcgactttactctgtgtgcgtggggagcaatggcagggttttgaacagagaagtgcaatgattgaaattatattttaaaacaggttccctgttgctgccatggtaaggggcaaagaggcctggcagtgggagaggatgatccagccaagatgctggcagtggacgtgagcagatgggttgattctagatatatttgaaggcagagccaacaagatttcctgatgggttagatggggtgtgaggaagagatagcttttggtctgagcggctagaaggatggagtgacccacagctgaggtgggaaagagtgggtggaacagctgttggaggggcttaggctaaacattcggtgaaggacatacaggatttaggatgtccagtacacatgcaatggcagatgttgaatatttggttggatatacaagtttggagttatggagagaggttagagctggagatgttataccccaatgggttcttcttattggctgcccagaaaagccaatacacagagaagagcaggagtattacagcagaaaaagagtttagtgagggccaggtgtggtggctcatgcctctaatctcagcactttgggaggccatggtgggtgaattgcttgaggccaggagttcaagactagcctgggcaacatggcgataccccatctctacagaaaatacaaaaaattagctgggcatgctggtacatgcctgtggtctcagctactcaggaggctgaggtgggaggattgctggagcccaggagtttgaggctgcagtgaactgagatggcatcatggcactccagcctgggagacagagtaagactctgtctcaaaaaaaaacaaaagtttaataattgcaaggcaatcctggcagtagttgggagataaattcttaacctgccttcctaaaaatttggaggctagagtctttcaaggatagtttggtggacagggtactagggaatggggaatgctggccggctgtgttagggatgaaattatagggggtagaagttatagcttcttcatttattgtgctatgacagtttccgggtgggggtcacaagatcatttgagccagtttcttggtatgggttactggttcaggtggcaccagctggtccatgggaaagcaaggtctgaaagatacctcaaacactagtcgtaggttttacaatagtgatgttatctacaggagcagttggggatggtgtaaaatcttttgaccttgtggctaatttgttagtttcacaaaggtggctttagtccctgagcaaggagggggttagtttcaggaagggactattgtcatctttgttttcaagttgaactatgggccaggcacagtggctcacgcctgttatcccagcactttgtgaggctgaggccggcagatcagttgaggccaggagtttgaggccagcctggccaacatggtgaactcctgtctctactcaaaatacaaaaattagccagacatggtggcgtacacctgtttgtcccaggtacttgggaggctgaggcaggagaattgcttgaacctgggaggcgggggttgcattgagccaagatcgctcccttgcactccagcctgggtgacagagtgagactctgtctcaaaataactaaataaaaataaataaaataaagttaagctatgagctaaattcctcccacagttagcttggcctatgcccaggaatgaacaaagacagcttgtgaggttaggagcaaaatggagtcagctatcagatttctctcgcagtcgtattacaaaggtgcaaaggtggtttcagagataatacatttgggagtcatcaacatatagatagtttctaaagcctgaagactgatcgaggtcagcgagggagtgcaaatagagacacaaagaggaccaataactgagagcgggaatattccaacgcgaagactccagggagatgaggaagacccaaagcaaggcaagaagggaccagtgagacaggaagaaagcaggagactatcacgtcctgggagccaagtgaggaaagtgcaccacagaggaatgcatggtcccttttgcccaatgctggtggcaggccaggtgggtgaggaccaagggctgatcagtgggttctgcaatgtgctccaggcaagaatggctttggtggaacaaaggtctgattttggtgagtatatgatagaatgggaagagagacactggagattgtgaatagggataactcaaggtgttttgctgcaaatgagggcaaagaaatggggagataggcttggtgcggtgactcacgcttataatcctagcactttgggaggcggaggcgggtggatcgcttgaggacaggagttcgagaccagcctggccaacatgatgaaaccctgtctctactaaaaatacaaaaattagccaggcatggtggcgtgcacctgtaatcccagctactagggaggctgaggcaggagaatcacttgaacccgggaggcggaggttgcagtgagccgagatcatgccactgcattccagcctgggcaacagagtgatgctccgtttcaaaataaataaataaataaaataaaataaaaaagaaatgagaagatagctgctgagggaagaggggttgaaaggtttttgttttgggggtttttatttttttttttaggattggagaaatcacagtatatctgtatgctgatgagactgatagaatagaatgtgaaaaacaggtagttcagaggggagaactgtttgagcccagtccttgagaagcttagagtattggagctggtggatgtgggggattggccataggtagaagcacagacaattctcctagggtcaaagccgggagggcagaacagtggatgcaaatatggtcactagggtctggaagtcctctctctctctctcctctgtgtttctctctctgttaacagctttattgagacataatcacatacctcaccattcacccacctgaagtgtgcaattccatggttttcagtatgttcccagtgttgtgcgcccatcgccacagtcaattccacaacattttcatcactccagaaagaaaccctgtgctattcacagtcactccccttccttcctgcccagtcctaggcaaacactaatctgttttctgtctctatacatttgcctattctggacatttcatgtcaattgaatcctacaatgcgtggtctttttttccgcttagcataataatggtttcagggttcagccatgttgtattaaaagtactcccatctctaaaaaataaaaaattaaaaaaattaaagttgactgggcgtggtggctcatgcctataatcccagcactcttggaaaacggtctagcaattcctcaagaggttaagcatagatttaccaaatggcccagcaattccactcctgggtgtatacccaagagaaatgaaaatatatgtccccaaagactttgtacacgaatgtgtacacagcagctttattaataatcgccaaaaggtagaaacaacccaaatatccatcaatagatgaatggataaaatataataataaatgtgtatatctgtacaatgcaatattattcaggcgtaaaaaggaatgaagcactttttttttttttttttttgagttggagtctcgctttgtcatccaggctggagtgcagtggggcgatctcggctcactgcaagctccaccccccaggttcacaccattctcctgcctcagccacccgagtagctgggactacaggcgcccgcaactaagcccggctaatttttgtatttttattagagacagggtttcactatgttggccaggctggtctcaaacttctgagctcaattgatctgcccacctcagcctcccaaagtgctgggattacagacaggagccactgtgcccggcctgtctatccttctgatcacagccatcctagtgtttgtgtgctagtatttcactgtggtttgggtttgcatttccccaatgagtaatgatgtatctcattggggatgcatcttttcacatgcttatttgctacttggatgtctttggagatgtcagctgaaaaaacacatgatttatagacttagaaaggagaactttatttcttaagaaggggttcacaacctacaggccggaagcgcagcctccacctgaaaaccgaaagcaagcacttcgagggagggcagggtggaacaggaatttatgctgaacgggctggccaaatacgcatattcagcaagttacaggaagaactatgaacattcatgaggggggtctggacgcatacatactgaacaaacatgcacgttacatgcgtcccatgtttaccttgtttaccttaggtagcagactttgcatataaatgcattacagttaaaccctacatgtcaaaaggacatgaaggtattcagtgcacagcagcctctgtaaaccggccagaaccaggccatggtgggtagtctcttattaggagaaagttactgaaatcagtctcttgtccaatcaaagctgcagttatggctggtaaatcagaggggtagggggtcagttagtgcctggcggtgggtaagctgcaattgtttcagtattgtttatctccaaaccagtgcttgtttagctgctagagaaaaagaaactcctgtggcagttagagcatagtttacttttataaatagtagtataaaaagtgtaggggtgtgtgactttatccttgcctggcatggccttaggtaatgtttataacttggtgtcttactgccacaaagagtctgttctgtgagtcttatgatctctgtgttaatgttcatgctggtcagttgttgtgtctaaaccacaaaagggatgggagtcctgctgtagtcactcttaggagaggaagtctaacggtggttagcaagggagaggtgtgtgtccaacctcccgtcccagcatggccaggaacccagtttttaagatttctctgggttcctcttggccaagagggggactgtttattcagttgggggacttaggattttctttttagttctcagagactatctattcagatcctttgcccataaattaattgagttgtgagactatctattcagatcctttgcccataaattaattgagttgttaaattttttaaattatcaagttggaaggatttttttaatctattctggatacaagtttcttttttttcttttctttttctttttctttttcttttctttttttttttttttttttttttttttttgagacatagtctctcactctgtcgtccaggctggagtatagtggtgtgaccttggctcactggtactttctcctcccaggttcaaaccattctcgtgcctcagcctcccaagtagctgggattacaggcacccgccaccacacctggttaatttttttgcttttgtttttgttttatcttgagacagtcttgctctgtcacccaggctggagttcagtagtgtgattttggctcactgcaaaccttcgcctcccgggttcaagcgattctcctgcctcagcctcccaagtagctgggactacaggcatgtgccaccatgcatggctaatttttgtatttttagtagagatgggggtttcaccaggctggtcttgaactcctgacctgaggtaatctgcccacctcaacctcccaaagtgctgggattacagacatgagctgccacacctggccacaagtttcatattaaatatatgatttgcaaattttatcttgttctgtgggttgccatattttcttgatggtatcatttgcagtacaaaagttttcaattttgataaaatccaatttctcttatttttatttgtattgcttatgcttttggtattgtgtctaagaaagtctaaacccacctaaggtcatgaagattttctcctttctgttttctactgatttatgctttctatttaattttcatttctaggtgaattggcaagtattttccggacaatgttaaataacagtgggcttctcttgttctattcctgactttaatatttcaccattaatcatgattgtatctatgggatgagatcttttaaacttaaaaaaaagcgtcctatattactagtgtttataaataattaaggactcttttacccccaaatgtatttaatctatagacataaatgtgtttttttctcttttgatctatttatgcagcaaaccatgttaatatttataatatggctaatattgagccattctgtaatgcatttctgaattaaatcttaatttgttggtgtacataattatttcatcatattgcttgttcaatagccaataggttttatcatttccttgtgattctttgactcatgaattatttggatgcaaacacttcaagagcatttttttctcttctgtttttgaaaaaacaagtttctaattttattgcattgtggtgcaatgtgataaaattgcagagattgtggtgtgcatgctattgattatttaattttagtggagaattcctttgtgtcctggttagtatatgatcatttttctgtcccattatgttggaaataatatgtctcctctaatagttgcgttcagaagtctatatagatcggtacctatatacattctttaactcagtcttgtatattgtttgtatcttctatattcttaattttttttggctgcttaatttatcaacatcagagtgagatgtgttaagatctctcaatatggttatgaatttgttcattttctttgtaatcttaccaactttgactatatttttttgtaaagcaatgttattaggtgcatataggttcaagatgattatgccttcctagtgaattatttcctttttctttgtgtaataactcttttaaatcccatcaatgcttttttttggccttacattctattttaccatatattaatattacaaaacaactctgtctttgttattttgtctttggtatgttgcttcactttcaacatttctgtgtcatcatgttttgaaagtgtccctctagtaagtttagttggttttctttttttttgtggttactggtttatttatattttctctctctttttttttttttttttttttgagacagcttcttgctctgtcatccaggctggagtgtagtggcgcaatctcagctctctgcaacctctgcctcctgggttcaagcaattatcctgcttcagcttcctgagtagctgggactacaggcgcccagcaacacgcccggctaattcttgtatctttattagagatgagttttcaccatgttggccaggctggtctcgaacttctgacctcaggggatccgcccacctcagcttcccaaagtgctgggattacaggcatgagccactgagcccggactatattttttcttttttctgttttattttgtgtttcctacttaacttgctttttcattgtttctttttaaaatctatcctgctttctaaaggattgattgtatgtactttactcttgttttagtccgtctgctggtttggaagttacacattctattttttattctcccagtgtttacctttatgttgctaatatacgcacttggtttaacccaatatgatttaaataaaaatgtctactttcctccaaaacaacataatgatcttggaacactttaattctgatcatactcccatcctatatcttttgttgtctaattatagtaccatattatttataaactccccaattttaaaaaatcattattactgttgattatttcaacttacagctgtttaccagtttcttttctcactcttgcttattgcattctactcttttttgtgtgtgtgagagttctgttttcaactgcctcacataaccccttagtagttctttcagggaaggcctatgtaaactctcttggacattgttcatttaaatattatttttccctgcatagttgagctgggtgtagaattctgggatgatagttattttcctttagctctctgaagccttattcattgtttttgggtcccctctgctcctcaaagaagatgagagttagtgtgtcagtgctttgtgtataatgtctttctctctggttatttttgtgacttttctctgtttcatatttttcagcttcactgagttaactgtaggtgtatagttttatttttcctacttggaagttgaggcacttattcactcttaggactcatggctttcttaagttctgcaaattttttcagtcatcatctcttcaaatagttccttgaccctgttctcaatattagcctttgaaatgcaagtcacatgtatgaaggacagtaaagcacggtggttaagaacacggactctggagatagtttcttggatctgacttctactccaacacttaatagctggggaaaattacttaaactcagttcctcagtttactcatctatataatggaggtaataatattaccaaactcttaggttgttgtgagaatcaaataagttgatgtatataaggtgtttaaaatggatactggcacatggtcagctctacgtaaaccttggtgattaatgttctcttgagtgccctagagactctgtactgacactgacacagttgcccagaagtcattagtgtaagtgatccggaaggaccctgcctttgttttagtccctggggatgcattttggccagagtctatgattatcagttttattttggaccctctcattctattctcttccttggaattcagattcatgtttttccatgtttgcattctgggtgattatgttagattcacccctggatcaccttgtctcctagtttactaatctgttctgaaatcctagcaatgagtttttaattttaatcactatatttttcatctcttggaattctacggagagtgttgaaatctacatgcttgtttcctgtagtttcctgttctttcatgcctgttttattattttactcattttataatttaaaatataaatgttagcataaacaatagatagattagcataaatcaggtttctccctcatcttggattctagtctttctgcttgtttatcagcttgtttttcctcatggcgaatcatttcctttggtagattataatttctgtgcaatattctagggaagcaaaaattatccaaactaatttaagactgttgacttttaaacattggtagccctgtgcttcctaggttgtggagatgttgcttcagaacatttcaaaaattgtttctgctgggagcctccatgggttcatcagtttgggacttatttttcctactatttctagctccatattggtcatgtaaatttgaactccacagccatggttcaggcttgggattcttttcattctgggaggcttccccctgcctcccagaatgaaaatataaaaatattttcttttagacagggtttgagttttctaggcttccatttcactgagcccttctagagccctagctttgtgcagtaactcagttctagttcctcatcttatgagggccctgactgaatctcctgtgggcaccaatgccccaggccctgacctgtagggtctgccatctgtgttcaggacttctggggcacctgctgacagttcattgttccagctcatgcctgaggatttccttttctttcctgaagtttagctttgtatctaatgatttttatctggtcagacatggtaggtcaagcctgtaatcccagtgcttcttgaggctgaggtgggaggatcacttgagcccaggagtctgacagggtctggctctgttgcccaggctagaatgcagtggtgtgatctcagctcactgcagcctccgcctcccgggtacaagcaattctcatgcctcagcctcctgagtagctaagactacaggtgcttgtcaccatgcctggctaatttttgcattttttgtagagacagggttttgccatgttgaccaggctggtctcgaactcctaatctcaagagatctgcccgcctcagcctccgaaagtgctaggattacaggcatgagccaccgcgcccagccttccatgtccttttatttaggatttttgcatctatagtgacaagcaagatttagtctgtgattttatttttgtttcatctttggcagattttggtaccagggttatgtgttattcataaaattaattaggaagtttttctcttttcttcatcctctggaacattttaaatagcatagaaaatgtctgttccttgaaggtttgaaactgcctgaggacagtgcctttgggggtggggaggactgttttccacatatattttccattcagcttctctacttcttaaatcagtttgtatcactttgcttccctagactatcatacatttaatcaagattttaaaatttactagcagagaattctatgtggtattcttatatttttataaattttttttgcatctctacttatctctctttcttattaatgttgttttttttctcttttcttggttagactttaccagagatttgttgatttcattggccttttctaagaagcagctgtcaaatttatttattcatcctgctgttcaactcttttaaaaatcaggacttcctcctatttaatgacttgttaaggcttattttcttgttctttttctaattttttaagttgaacatctgtccaggtcatgtattatctttcttctttacgaataaaacatttaaactgatgacgcttcctctgagtacagttctggccacattccgtaagttttggtatgcataaattgtcattagcataattttttgtagtctaaaattgctcattttatttcctccttgatgcaagagaggtattcaggagggtactttaaagctttttattttttcttttgttattaatttctagttagatagtaatgtatcccatacattttttaaaaattaccatatttttataaaatctaaaatgctgttgattgtaatggactccaattattttttataccactaaagaagggaaaaagaaaaaacccattgcttattaaactgtaacatcccatcagttataagaagcattctggtttcagagatgatgtgaaaaaataaagtacatcttagaatgtgtgaaatagggagattatttgtccatcagtgtgagagcattgtggtcagagaatgtgatctgtattgtaatagttccctgaaatacattgtaacctggtatttgatatgtggtcagcttcatttttttggtttttgttttgttttttgagacagggctttgctctgtcacccaggctggaatgcagtggtgcaattatggctcactgcagccttgaaatccagggctcaggcgatcctcccacctcagcctcccaaaatagctgggaccacaggcgcacaccaccacaccgggctaattttaaaaatatttctgtagtgacagcatctccctgtgttgctcaggctagtctcgaactcctgggctcaagtgaccctcctgccttgacctcccaaagtgctgggattacagacatgtgtggttagtttttataaatgttttataggtgtgtgaaacaacgtttatctatttataatgtatcattatttatcatttataatgtatcttctatatttgctagttacaggaatatgtatatttctatgcattctatatgttatatatgcatatcacacacaggcctatgtaaaatcagtgttgaaattgtgcttttcaggtctcattgcttggttttccattactgcgctgagacctgttaaaaccttccattttgatggtggatttgttaattttccttgtgattgccactttttgctttattacacacacacacacacacacacacacacacaaacacacatatacttatacacacatacacatacacacatacatatacatacacaaacacacacgcatatacacatacacacacatatatatatacacacatacacacacacacttttttttttttttttgagatggactcttgctctgttgcccaggctggagtgcagtagcacgatctcagctcactgcaacctccacctcccaggttcaagcaattctcctgccttagcctcccaagtagctgggattacaggcacacaccaccacgcctgcctaatttttgtgtttttagtagagatgggggggtttcgttatgttgaccaggctggtctcgaactcctgaccttaagcaattcgcccacctcagcctcccaaaatgttgggattacaggcataagccaccacacctggccacacacttatttttaagggacaaagtcttgctctgttgctcaggctggaatgtagtggtgcaatcatagctcactgcatcctcatcctcctagctcaagggatcctctcacagcagcctctcaaatagctgggaatacaggcacacaccaccatactcaactaatattttaattattttcgcagagacatggtctcactatattgcccaggctggtctcaaactcctgggctcaagcaatcctcccacctttgcctcccaaagcactgggattacaggcatgagccattgtgcccagccaacatacatacttaactataaattttttagcaagtctaaagttattatctctgttatcctccaaaacaagcaaggacctttgcataccagaactgtacactgagcattctctcttgtcttccttattgttataactgagaatttttcccaccttaatacaaaaaagtatcattaatatttacagtagggctgggtgtggtggctcacgtctgtaatctcagcactttgggaggctaagatgggtggatcacctgaggtcaggagttcgagaccagcctggccaacatggtaaaagcctgtctctaccacaaatccaaaaagtagctaggtgtggtgctgtgcacctgtgatcccagctacttggaaagctgaggcaggagaattacttgaactcgggaggcggagattgcagtgagccaagatcacaccactgcactccagcctgggtgacagagtgaaactccgtcccaaaaaaacccatatttacagtagatagttaattaaatttacttataaattataccaatgttcatgtattttaaatctcactccttctctgtgagttcatttttcttcttgccaaaatgtatcctttaaaattcaatttcagggcaagccctcttagttttggatgtctgaaaatgtctttattttgccctcattcctgaataattgagtaggatgacctttactttcccgtagcactttataaaaatattatattactacattgtttcctgggcatctcttgatgccagaatgtttacagctgttctaactgttggtaagtctcttttcttcctgtaaactttgaggtttttctctttgttttgatattctggagttttaccaagattacgaatttatttttactgtttagcagtttgtgtacatttttctggaacattctcagccattatcctctcagtttattactttttctaccagaaccctgttctcttcttttaggactccatattagatgaatggggtgctttttaacaattgcgtcagattccagagtgtggatttattcatttaaacatttattatttttaatagtttgtttgactattcttcttctaatggaaatttatacttttctactaaaaacaatgctatagccaatgattttatttctctctttttgctagattctatttttattgtttcatggttaggtaatgactttttttttttttttttttttttgagatggcgtcttgctcctgttgcccaggctggagtgcagtggcacaatctcggctcactgtagcctccgcctcccgggttcaagcgattctcctgcctcagcctcccgagtagctgggattacaggcaagcgccaccacacccggctaattttgtatttttggtagagatggggtttcaccatgttggccaggctgatttcgaactcctaacctcaggtgatccaccttccttagcctcccaaagtgctgggattacaggtgtgagccaccccaaccagccaggtaatgacttctattgagatttttttcctgtagtccaatataagcccattttgctaaataatctgtaagtaaactatattctgtttgctgagcacaaaaatgtgagagggagtgccagattttgtctgttgaatccttaataatctcaattttgtttgcacaatttgttcatttaaaaagtgttcaggccaggcacagtggctcacacctgtaatccctttgggaggccgaggtgggaggcctgcttgagcccaggagttggagagatcttgtctctacaaaaaaattaaaaaaataaccaggaaaggtggcttgtgcctgaaatcccagctactcaagaggctgaggtgggaggatcacctgagcccagggaggtggaggctgcagtgagctgtgatcgcacccctgcactccagcctgggtgacagagcaagaccctgtttaaaaaaaaaataaaaataaagagtgttaaaaactttatgtgtcgagatttatcaagtccccttcttttgccctaatcatttgttttgtagacttggaagctatgttgtgagacgtacaggtttctgttcatggcagtcactccacggggctgatccctggaatcctcctgaagcttttggggacctcacaactgggccctgggctccaccaggcttcctggcccctgaggggctgcccagccttcctcacaggctgtctgtggtggcctgcagggctccttgctgtgtctgaccagccttcctctgtggatacgggccccacccctcaccccatttttatatctttttgctctttttggtggaaatttgggagggagagcgattcaatcaatgatgctagttgccatttgtaccatctcttagatcctctctacagctgctttttaaggcatggaagttcttttcctgactcctcagcttaacttccttccttagctccagcctcacgcttactggaggtgaatgttgtccattcctgcgccgctcttggaaggaaagaatgtttccagcccccttgatgccgttcgtggtgggggcagagagctggtggtgctcatgaggtaggagatgggcaggactcgtttctggtcacaaccttgctgaccaaaacaagatctggtccagacaagatgaagtgaagaaactggtggaaaccagcagatggtgatgaaagcagtcccgggctgccctcattgcccattagcataaaacacacttgccagcgccatgacagtttacaaatgccacggcaatgacccggaagttgccgcccctttcacatcagcaacccggagtttactgcccctttcctgcaaagctctaaataacccaccccttgatttgcattaacctgcctcctttcaatttcagtttgcatgcaattgaaagtgggtataaatgcatataaatacggttgtcaacagccagtgccttgggtgcactgcctgtgagttagccctgcttcacaaggagcagtactgttcaataagattgctgtctaacaccatctgtttacctttaaattcttttcaagggtgtgtgaagccaaagaccctcccaggctaggccccagttttggggcccacctgtcctgcatcactagtagcctggcctgtgtgtttggtggcctggggttggagattgggttctggagggagacttcttatgccccctcttgtctgcgaggcacggggacttggtgcactgaccggcttgttgacatgcccagcactgggttgggttgagcccaggagttcagaagaccctgtctctacaaaaataaaataaaataaatgagctgggtgtggtggtgtgcacctgtaatctcactttccaaagtgacctgtggacaagggatcccctttcctgggaagaaggagagcaggttacggatgctcagatgtttgtgtgcattgagattggacttggcaacacctgcaccttggaatattctgggcagttaaacatcactatgttatcattcagttctcacaacaaagccctgaactgaggttgagctcatgtatgcgacccagtgggattttcacccgagtcctctgtctctggtcccttgtggaggtcacctttatgggggtaacttctgtaagcaaagctccgcactcacggagcccctctgtctttccccatggagggtccatcgagccctttgcacggtggtggcctagccccccatggctgggccatcaggaaaggggtgatgcccactgcctcaccacattctgccctgcaggctgctcagttcctgcccccactgcacgggggacccttgctcctttggctccccctgaatgggcagaggagctgcctctcatctgttcttcaccagcagctcaagaggtctttttaaaaggacagtttcagccatgcacgatggctcatgcctttaatcccagcactttgggaggctggggtgggtggatcacttgaggccaggagttcgagaccaccctgggcaacacagggagatttcatctttacaaaaaaaaaaaaaaaaaaaataggcgggtatggtggtgtgtgcctgtagtcctagttactcaggagactgaggcaggaggatcacttgagcccaggagtttgaggctgcagtgagatgggatcgcaccactgcactccagcctggacaacagagtgagaccctgtctcaaaaatgaataaataaaaggatgatttcttttttttctctctttttaaaatttatttatttttgagacggagtctcactgtgtcacccaggctggagtgcagtggcatgacctcggctcactgcagcctcagcttcctgggctcaagcagttctctcgcatcagcccccagtagctgggactaagacgcgcgccaccatgcctggctactttttgtatttttagtagacatggtgtttcactctgttgcccaggctggtctcaaactcctggattcaaacgatctgccagtctcagcctcccaaagtgctgggactacaggtgtgagccactgcacccagcttgaaaggacaatttcgtacatcactccacacccagctacatccttgcctggaagtgccctcccctacctactgcctttccactctaggtctcaccttgattgtcctggcatgggggccttccatggcacagaccagggcaatgctgtggtccctggctcagggactgtctttgccccacggggaatgctgtgagggggtgcctggagtcccagcgttacgcattgaccagcgcatggtgagtgctcagtgagggttcctggaacaaacggatgaggtaaaggtggaggggcaggaggaaggaggtggtgaagggaggaggggaagaagaggagaggaaaaggtggtggagaggattgttcctgagcccagctctgggttctgcctgttcccgaacgccaacctttgctgcactgctcccagtgggtgccaactcagaatgcctgtttaagtcactccacaaaactcagcttctcaatctgttttatatttgcaagggccagatccacattccttttttaaaagtcaagcttctgagacagtcatttatattcacagtgattctcctttcaaagactgctttgcatggggcgtgtagagtcatggatcttagggactctgccaggaaaggctcagggtcacacaaagaccccgtgatggtgtctgtgttgtagaggaagaccgaggaactctccaatatgcctgggtggaggtatcttcaaatggacaggatgcgtggccggagcctgccgtccatccactgaaaagtcactttctgaagtgacccctggacaaaggatccttcttcctgggaagaacagctggttatggatgcttcagatgtttgtgtgcatggagattggactttgcaacacccacactttgaaatattctggacagttagttaaaaagcatcaggtggcccacacctataatcccagcactttggtaggccgaggcaggaggattgcttgagcccaggaattcgaaatgagcccgggcaacatagcaagaccctgtctctacaaaaaacttaaaaattatctgggcctggtgactcgtgcctgtggtcccagctactcagtgggccaaggcgggagaatcacctgagcccaggaagtcaaggctgcagtgagctgtgatggcaccactgcctccggcctgggggacctagtgagaccctgtcccccaaaaaggtttaaaaagcaggaggggccaggtgcagtggctcacgcctgtaatcctagcactttgggaggcagaggcaggcggatcacttgaggccaggagttcgagaccatcctggccaacatggtgaaactctgtcactataaaaatacaaaaattagcaggacatggtggcaggtgcctgtaatcccagctacttgggaggctgaggtaggagaatcgcttgaactcgggaggtggagtttgcagtgagccgagatcctgccaccgcactccagcctgggtgagagagtaagactccatctcaaaaaataaataaatacataaaataaaaagcatgaggtaggtccatatgcactgctgggaaagatgtctgaacagtgttgttaagtgaaaaaaagcaaaccgtagcacaatatgtacatatatacaccatttatggcaaaaacacacacaaagccacactgtatgtcctctatttacatatttgtaagttcatatctaaaagtctgaaaggaattatgccaatgatcgcagttcggagtggactggattggggcgactttcaaaggaatcttcacttccactgtattgtttgaagttttttcctgtgagaatgcattcctgtgtacttgtgtaatttaaagagatatatggatttagaactgggaatctatatggtttaccctgagcttctgggattttcttttttatttatttatttatttattattattatactttaagttttagagtacatgtgcacaatgtgcaggttagttacatatgtatacacgtgccatgctgatgcgctgcacccactaactcgtcatctagcattaggtatatctcccagtgctatccctcccccctcccccctcccccctccccacaacaggccccagagtgtgatgttccccttcctgtgtccatgtgttctcattgttcaattcccacctgtgagtgagaacatgcggtgtttggttttttgggattttcatttttatttctttgagtgattatgttaagtggcttacccaaaaaagttcactggacatctcaaaaggttatttgacagatgatttaaaaaaaattatactgccatttttatgcatgtgcttaaatatctcaaattgttttctaaaattggttgggaatatatttgcttttttcccccctttatcttgccccatccccttcccagcctctggttactgccaatcttgtctctgtcttcatgagatccaattttctggttcccacgtatgagtgagaacataatgatatttatctttctatgcttggcttatttcactggacataatggtctccagttccatccatgttgctgcaaataacaagatttcattctttttaatggctaaatactattccattgtgtgtatgtaccgtattttctttatccatttatccactgatgggcacttaggttgatttcacatcttgactattgtgactagtgccgcaataaacgtgggagtgtagatatctttgtaatacgctggtttcctttcttttggatatatacccaggagtggatcatatggtagttctatttttagtttttttgtggaatctccatactgttcttcatagtggctgtactaatttacatccccaccaacagtgtacaagagttcccctttctccatatccttactagcatctgttatgccagacagactatttataagtgaattatatttgtagtttaggccagaggtcagcagactttttcgtaaacgaccatggagtaaatattctaggcttcatggacaaaaaggtcactgtggaagtcactcaattgccatcataatgtgaaggcacccacagatgatacagaacaggcgtggctgtgttccaataaaactttatttccaggaacaggtggctggagggtgtggtccatgggccacagtttgccgaacactggtttaatggattgcaagacacagatgggtatggaaatggaggaagatggcaaatggaaatgtgttggacatttaatcagaactagcatgtcgaaaggattgtttgagtatcttcaaaactgaaaaaaaaaaaaagcttttctcaagtgcaatcctgtagcctcttcctgctggaccagggtgaggctggggccgcagaacccaggagcagtgtcccccaaggaacacttcctctgtgactcctgatgggtagagggtggaggggatgggcaggccttcctcaagcctgagtttgcacatggttcacactcagtgggcatccgggaaagtgatcagggccccagtggcccacccagctctgggcaggcagcagacaaggtcagactggggtggacaaatgacaaaatgacatcctcaggtttgggaggggacaagtggtgtctctgcagctggaggccgaaaggcaggcctctggctccgggacggggtgtcggaaacggctgtgccccacacagctttctcgtggatcatgtctgtgcaggtgccttggggcctgagaaagaagcaacgttggctgcacaacaggaaaggcccattagtgcctgtcgatgtaggccacgctaattagtcacgtggctggagatggagcagtcttatctggaactgagcccttcatgccccacaggactgtgaaagtcagggggtacacatagggaagatgggctttcttctcccctccatgcccgtggaagccctccaggctgagtgtgagcatgtgtgtgtgtgtgtggaccctgcaaatagatgtggcagagaaacagtcactagcagacaaggactccgctgtctcctcctcccagcctcacggggagaaatctgtctgcctcgcgtttctagagtcacagtgatgacaaaaaggaggcagagctcacggatccaggaatggggttacgcggagaccagcagagttacactgcagagaagagaaggaaccggaaggtgggagggtctggggcaggtggccgatggagcccagaggctgggcatcagggaagagggtgccgggagaggtgggagagtgggaggagaggggtattgatggcatgaccagtggaattcctcttgttagtaagatttgaagatagacttaattagagagtagttgttaagtggtatttttctttttctttctttctttcttttttgagatggagtcttgctctgtcacccaggctggagtgcagtggtgtgatcttggctcactgcaacatccgcctcccgggttcaagcaattcccctgtctcagcctcccgcgtagctgggactacaggtgcacatcaccatgcctggctaattttagtatttttagtagagaccagtttcattatgttgcccaggctggtcttgaactcctggcctcaagtgatctgcctgcctcggcctcccatagtgctaggattacagttaggtggtatttttctgaaagggaccccagggatgccaaagccagcctgggggccagcccctgtgtgatcacaggcgtgtgtatgcatcgagtgcccatgagaaggcacctaggtttgcacatagtgaggctgcagccagcatcaccccatcttgaagaatggggtttgcagatggagggtgaagggcacattcatcccctttgcctgtgtgctggccaacagtggtcagccacaagtggatgttgcccagagaccctttccttgggtctaggtttcgctgtgggaagggaagtgggagaaataacgtaggagaaagccttcctgcagccccaaacggaatttcctcccctgcttgaagtcagatccaattcacaccctcgcgcagcccgacggctggcgctggctctgtttggtaacatcgcagcaaacggccaccttgtctctattttggttcttgctttgccacttctctctgcacctttcaagaagtgttccttccttctggaaggctggggtggcaggctcccccagctccttcccattctggtaaattaaggaacaaacggtgccaaattgttcttgtctgttttgcgagatgattcgtaaccagcttgttttcttttcctccattgagcgaatgcattaaaactaaaattaaatcattacccgcagcacagacgacactccccctcataattacatcctcttaatgggcatttgagagcccagctcattttaatgcttgctggaaaacgtctcagacacatttatttatttttttttaggtttaaaggtcaacaagaatatcttaccttaatttgacaagtacgcaagaaataatgcaagactcgtttatgttcaggtaatgcacaaagaaatctataaatcaagctgagggaatattagatgatgccatatcggaaccatctgccttcattctcggaagaatcgataccacaaagaaagcgccgaagacgtagatttatgcccttgtgtcgggggaaaaatatcggctgtttttagagtcacttcatatcctaaaacaacagggcctgaggaaaagaatgagagtgggcctaaccccgagtgaatgcgtcagacagcacatctgacactcggttttcgattgtctctgctggagaaagaatggtcccaaggtcctttcatccccatgactctgccccgtctgctattgtatttatttgagaggctgccaggaatgttgagatggcgtggaagggaattaactaaattgcatctgtgtgattgttgccagggggtggaggcttgtagagctcggggaccctgggttttccatgccatgcacactgcctaacactctgccctccttgggagagccttcgctggccttcatcatggagctgggggaacatacaacctccaccatattggatgttgggcttgtccaaagatgtgtcaaatgggaagagctgtctgggctttgtgaggggggaaagatagcctccgagcaattagggtttggaaaaatagggtaatcatcttaccacctaccccagaagtggtcatgaagagcagcagctctccagggaggtggaagggaggaagaacagatcaggtgaccctctggcaagtgtatgagaatctccaaggagggaggggaagagttgtaagacttgaatattgaataattggagaggctttttttgtggggggcttcaaaatataaagttatatttttataatcaaatgatagaaataaaggcttttcatcttttcctgggggtagagcgctgcagaattttgaataaaagagatttggagattctgagattttgcttcgtgacactcgtattaggatatatggactctcgtgcgtgtgtgtcgccatttatactgtggttcccatcacgggtcaaaaacaagcattttctgtttgaacgtgaggatatgcttagaggaagaaagtttgatttttgtatttataacagagtagcacaaaaatgggtccgtgagcctcgggaaacgtatttgtgttgcatccttagttttatcctttcaggagttgaagttgcttctaatgttatgagagggaaatcaaagggcccccgctaagcagaatcgttcccatcagccacaggcaccagtgcactgtgctcatgaccttttgtgctaaacaaacccacagacacacatacgcattcctgcttcttggagcccgggtgtggatggatgcctgacctgccccatcaccctttggctactggccacagagttcacattgtcacagagttcacattgccatctacaaaccaaacatgaacattaggactctcgtttttgttttctttgtcccttttgggtgtagctgaaaatgatacttgcagctcatatcaaagatggatttatgtctattgcaaagatggcgacgtgcaccttcctggaggtgctggcaaattccaggcagtgaagccaaaccactctcgtgccttaaataatgttggatcaagatcatgtgaaatttattctaaaacctgtggtttttatttcttcctgcaaagctccattctctgcttcacatgagagaaattagcaatgaagcacctcgtcaggatccaaaacgcctgccacccatctgtgcaaaaccctggcagtcctggaggagacaaatcctcaccttcctggaaaacttccatgaaacctgcagtgagggcagccagaccttaacttggcaaagaaactgtgaaggcagcctggagtgccaaactattaacttagtgagggtggcaggcttcaagttttgcagaagcccaaatctattatttaactattagttgtgatgaatggatgatgaagggaaccaacgtagatatgcatgaggcatggccgaagatgatatcattgaggaaatgctgttttcttaagctttggtgactaactatagaattgattatgtctttgaactggagtcaaatttcttctaagtgagccgaattggaaaataatattaaacttccattaagggtgttccagaaatgccgaattcaagacaaggattgtgtgcgtttctgtgtgtgtgaatacaaggggaaaccttacagatatttgcagaatatactccatcatttcctgccaagcatcagcttctagtatttcgccaagttttttagaagacttcaaccttgttagcaaagtaattaagcagaaagaaagaaaagaaaaaaacaaaacccacaaaaatgaaaacaaaaccccaatgcattgagtgccttgctgtttttctgattctgtgaagttgaatatcagtgaattcaaattgcacactgggttcttctgatatgaactgaaattgtcaaagatgttgggtgagtctatgggctgaagtttaccgtatttttaatcatctgagaaaagaccaactgcaccaaactttcaaaattgatcattctgaatagtgcttggcatactcagcagacatgattgaaatagttttgcagacacagcgtaaacataaaataccaaccccatcacctgtcctgacacacaccagcagtggtagcccagggccagcgctggctgcagaggcatggtgccaagatcggctgctcattttcccttcttgatgaatgcttacgggccagtttctggaagccctttccaggagcgtcacatttttctgtgggtctgcctgcagcccgggctcctgagacatttcctaaagacctccattagaagcttccactgctccccttactggcaggcgttcagcctttgccaactgcaggttgatggaattgtcggagagagagcatgtcggggggctctgttcatctcccctaaagtagtcactgacatgagcaacactccctgtatgccaggcactgctcccttattgcccattttgtcctcgtaataatcttgcaaggtagccacaagagattattactcccattttgcagatgaggaaactgaggcatgaagaggttaagtagcctatgtagctggtaagtggaggagccagagtctggaccccggcatcctggcagttccagcctccttctcccagtcatcactgtatgttccattgttccgtttctatttcactcacatataacgagcagctaagtttcctgagtttttggatatgacaacaagcagcgggggcccagcttactgagaagagtgaattacagttttttcaagatccagaatatccacatcagaaaagctcatggccggcaagtgtgatatcaacacacgttgatatcacagcatcaaagtaaaaactatgtaattttcaacatccaaataaagccttctttgaaaagcaccgattttcacatgagaatggtggacagatttccacatcctggcccgagatttctcaccgatcctgttgctgttgtctcttcccaggccaacctgtttctgcctggcctcttcctccaaggccaagaggggtcctgccaaagtccaggtcagagagtgtcctccctctgctcctgtctcattcagagtcaaagccaaaatcactggagtggcccacatcactgccccccattgcttctctgaccatatcttctttcgtgcttctttatgtctctccagacacactgggtgtcaagagtgctgtcaccccagggcccttgcacagctgattccctctataacccttggttcacatgttgccttctcagtcagaactcctcccacatactcacctttggcctcaagctctcccagtcctcctccccctactgtgtttttcttctgtccttagtatttctcaccctctaaggttatatataatctgcctctctcctgcttggagtggaattctatgagggcaggatctttgttttgttcatgaatggatcccagttgcctagaatagtgccaggcatgtagtaggtgctcattaaatatttaccacatgtgtgatttacctccagaggggaggagggttgcaaagggaaccccaagtattggtaattgttttattctttaagcttgggtgatgaatgtgctggttcttctttatgttatttacctgtatgtatgtgtatgtatgtatatatatgtgtgtgcatatatatacacataaatatattctgcatatctgaaatgtttcatattaaattttaaaaaatcaaacaggatcaaaaagtaaaagaggtgtatggtttatataagtggtggaatcctcttctccattgaaagtatttcttttctttttttgtgtgtgtgtgtggtggggtatagagtctcactcttttgcccaggctggagtgcagtagtgcaatctcagctcacagcaacctctgccttccaagttcaagcaatcctcctgcctcagcctccccaggagctaggattacaggcgcacaccaccacacccagctgatttttgtattttttgtagagatggggtatcaccatgttggccaggctggtctcaaactcctgacctcaaagtgatccaactgcctcggcctcccaaagtgctgggattacaggtgtgagcccctgtgcctggcccccatcaaaagtattttttcatctttgtgtaccatctcatgtcagcgacggaaagtgcaagttcttaggcagatgtgtttgcgatgggggaagatgcggagaaacaggaagaaaagctgggcagggactctgactggccgggcagtcggggcccacacaaccagaggagctgactgtcaaagcaagagtgttggggaacgatgagaaatgaggtggagagttagccaggatgagacggccctgggccagcttccgagagcaggacgcttggcgtggatgtctgaccacccttggcaggggagcctgcatctctctgacagaggagaggaagaaagagaaatgacattttctgagccgccaagaaagaagaggcctgaatggggaagggctgagttcagggacctggatgaagacatcacgtggggtgacgctgtggttgaggatggacccaggcaggacgcgcccaggtccaccactccctgtgaccccatgagattccccaaatcctcagaaggggagacacttcctgggtttgcaatcacctccagtttatgtatatagccagaaggagtaggagtccagatgtggaacctctgacccagcccagggctgtgtggtccgtgggcgaggtgagctggccaatgtccgggtgtcgtggctgggaggacacagctggtccccgtgcccgccaagcagcttcccagatatcgatcagtgcctctggtgagcatgactccttctgaggagtcccattgatcaggccagatggaaaactagtagctgtgattgggacgagtgaatattcatttggaaatgtcaatgagtaactggagatgatgcctgcagtgacttgcctggcaggatcaattccagacatgaggtgaaccagacgttggcggggacctaaggtgggagccagggaccctgggtggggcagggggagtggtggaggccagagaatgtgtaggacagtgaggtcagacacatttccctgcctccccacccccagttctgaggctctcttgtctgtctggggcttttgtcttcaagtgtggcactccttgcacagtggccaccaggccggaggacgtctgtgtgtgtgtggaaggggttgaagggtcccaggacgtgcacttgctggaagaatgcatgggtctgctgaacctgccttcctcctgggcatgctgggaggaggggctgcaagaaggtcaagctggaggggtctctaggctctagctgagacccttctcccactttttttttattttttattttgagacagtctccctctgccgcccaggctgaagtgcagtggcatgatcttggctcactgctacctccacctcccgggttccagcgattcttctgcctcagcttcccgggtagatgggaatacaggctcgcgccatcacatctggctaatttttgtatttttagtagatacggggtttcgccatgttggccaggctggtcctggactcctgacctcacgtgatctgcccatcttggcctcccaaagtgctgggattacatgcataagccaccgcacccagccttttctcctcacttctgtcagtaggtcccagctgtgcacaagtcagggctggggccaggggaggctaggagattttggttagggtctccttgcactgggatggagggatggagggattcagccacttcaccccaggagctctggccctggctagaggcctcctggacagaggagggaagtcatcgctgctggcctgtgaaggggccctgtcagcttattgccaggtgcactgtcacctaggtgtggcctgctacttcccccagtcccaattaaccatctgcaggagctgccatcggcatgggggaggggctgggtcccactcgtctgtacagactgctcagctaatgagggggtctgtgaaatttttaattacggctcccatgcctggcttaattatttgcatatggcttttacaagtgggaaaaggacgattgcatgcagcgcagcacttctcctcagccccacgtttgactttaattaaaggcagaacctgaggtctttccatcactaatgatcgtggaaaattagcttccaattcccaggggtctccagagtgatgcaccctgaggcggagagcgggcggagaggggatggagcagggagaggagcgggaggcacagatggcagatggtcctgctgggccgccactctggagtccccccaaccacaggccaccctcccaccaccttccctccaggctgcgtagagaagggagcctcactttcctctgccaggaagcagacctgaccttgggcagcaactaggaggaagacctgctgagctggggtgaaggttgccagggtcattctcccgttggccaggagctgggtgtgttctggctgtagctggactgctcccagctggtggccacaggcagaggagtgggagtttctgaaatgagtatacgtgtgtgcacacatgtctacagcatgtgctcacccaggcacacagatacacaggatggagccgtagagacacacctgcatgctcacacatgtatgtgtacatatgtccactcaggagcaaaggagtgaatgtgtagtgggccctgtggccatccctgtgtccccatccctcttgtctcctactcactgagctgggaggagctgaccccagggcagtttcatcccgctgtttccagtagccaggcctgcaccacccccagcacagagcatcccctcagccccaggcacactaggtcaagaagttctattggctcaggatccaggggcttgttcccttgttgcggatggggctccctcccttctactggacataatgaggatgcctgtagcttggactatgtctgtagccattgaaccatgaagggagctctcaggataaaacctgccccaaggacaggagcagagccactagcagagcctgggtccccagtgacactgtagagcctcgatttccctgatgagctgggttttctgtttctcgcttccaaaaacatcctggtctaggcagagtttgtgtccaatgcgtggtctcacactgcacgtggttgatggcaaccactgaaccacgcaagagctggtttcctggcaacaccccagcctccttcctgccccactgaggaggctgccctgtaggtcagggctgagccttcctggcacaggggctgaagtcatcagccagggctgccgtaacaaagtccacagactggggagcttgaacaaccatgtttaggtgccatctggtcacagagctgtaggaaccagcttctgaccagtgaggctgtagcagcctctcttcccagaggatttttctccctcagctgattttgcacaaaagtccttgaaccgggaagcattgttctcatccaggggtcacgtgcctttccctaatccaggctcccgggttgggggagctccagagtggcagcccagcaggaccatctgcctttccccaatccaggctcctccttaagcctcatgtccattctggatttggcctgaggtccacccattgcctcctctttcattgtaggaggctgaggcaggaggatcacttgagtcctctttcattatagagggagcaatgggtggtggacctcaggccaaatccagcatggacataaggctcaagtaagtttttttaaatgtgcattgcttgccaatttcagaatcaggaaatttcaagttaaaaatccagtttccaaattggaaggtctaaaggtctgcattgctacaagggtcatcagatgtgtcatttaaaaaataattttgggtccagtgcagtggcttatgtctgtaatcctagccctttgagaagctgaggcaggcggatcgcttgaggccagcagtttgaggccagcctggccaacacagtgaaaccccatctctactaaaaataccaaaattagccagacgtggtggcacacgcctgtagtcccagctactcaggaggctgaggcaggagaatcacttgaacccgggaggcagaggttgcagtgagccaaggtcgtgccactgcactccagcctgggcaacagagagagactccatctcaatataataataataataatttttgccccggtgtgatggcttacgcctgtcattccagcactttaggaggctgaggcggaaggattgcatgaggccaggagtttaagaccagcctgagcaacatagtgagaccccatctctataaaaatttttgaaaattagctgggtgttatagcatgtacctgtggtcccagctactcaggaggctgaggcaggaggaccacttgagcccaggagtttgaggctgcagcgagccatgatcataccactgcactccagcccaggtgacagagcgagacccagactcttaaaaaagaaaaaaaaaaaaagaaatccaggtttccaaataggaagatctgaaggtcttgatctgctaccaagggtcattggatgtgtcatttgaaacataatttttattatgaaagtgtcttgtggttattataggaaatgagctgcttcaaacagctgctcactagagaccaatgactgacattttgagtcccactataaaaacgcctgtcttcattcctctttagagcaatcacataagaagtcagggctccagcaaccccttgtgtgatcagccggcaggggggggcactggggcatgagtgtggggtctgtgtggatgctcttttgctttaagatgctcccagttagccgagtgctgcccacatccctgccccacctgcccctgcctggcagacagatgccacagagccccacgtacagggatcataatggtttacacctcttctgcctgtgtccttgaggttgagcgatgagggcatgtgaaacccaggatggtagaaaagaggctgcaggcttagggaaagaaaccagagaaaccagactcccttggatgttgttcaagataagcaaataattcagcagagccatatggaaagatggtgagaccggccgtggaggagcaggcaccctgcagagaggactgggacccagcagcccattccaccagacccaagcctgttcctccaccccagggcagcatcccaccactgcaggaatcttctcaaatagctccatggtaccagtccaccaggggcctacttactggctgggaaaacaggagcccagatacatagcatgaggatgccccaaatctcccagtgacaacattgaatgctgagtgctgtctcctctgtgttactctcccacagtcccctctgtcagataaaagccgttagtctctggaacacacaggagggtgcctcacttggcctgggggccatcaaggaatggtgagagatgagactgggcacgggaggttggcagaggcaggatattcacagatctggtggaccatgctgagacattttaacttgggtcactgggcacctggggggcttgggagtgaccacagatgtattgcaggacaggtgttgagatggggagctgtccaggctacaggtgctgaatcagagccgcaccgagggactgggaaagaaagacaggacacatgttcagaaggccagatctgcactcaggtgtcaggagagggaggaagtgttagtctggacccacatttctggctttccaacactctgtggggaaaaagaagggcaccaaggggtcactggggtggaggagacttggaacacaggacgttagctggaaggagatctgaggcagagactaatggagaagggatgttcctgtcccatgcacagtcactcattagtgcttccaggtcatttgaagccccagtcacttcctggtggcctaaatgagacctgtttttccacagagcatccaggatagggccaagagacttttgttctgccatattcttagtcttgagccttcacattgggagagaccagcctgttttgagatgagctccagggaaaatcatgctggactggtagaggtcaagactgtgagggtttacctgtaaacccagtgctttgggaggccaaggtaagaggattactggaggccaggagtttcagaccagcctgggcaacatagtgagaccccacttctacaaaaaattaaacatttaaccaggcactgttaaattgagtagtcccagctactcaagagtctgaggtgggaggactgcttgagcccagaagtttgaggctgcagtgagccatgattgcatctctgcactccagcctgggtaatagagtgacaccctgtctctaagaaaataaaaataaaaaaagatattggaggttaccctttggaagccagcctccttccaaagggtatggccatgcttgtgtgctgagtggacccacagagcacaaccactggactccacatgaccccagcccgaaggacccagctggctccagtgcaggagcttcctttcaccttcgttgtccttttactagcttctcttcattcgccacacattgcccaagcacctgctctgtgccaggcactgttggcagctggaaacacaaagacaagtcctctggggcctccttgtgccagccacagggagagagattccctggaaggcagccaaggcttcttgccattctctcctcagaagtctatggactgccttgtgtgtctgcaccctgccaggggccagggcatttcaggtttactcacagactcctctctgtccatattataccccaactttcaattttgagaagtaaatatgcaattttttcctccctgtaattttccctgctgtggctgcggatgtcagagccgctggaaaatgtgaatagctcagtgctttctagaactgaaaggaagctggccatgccgcatcctacatccccaggtgctcttggcaggatccagcagctcaggtggggagagatgctctccaggctgtactgtcgagggaacttttaacccaaataattcatgttcccaccttcttccattagcaacgagataattgccaagaagtaagtgtgtatctgtgtgagtgtgcacacgcatgcgtgtctgttgcagggacattagcagaggaggcgaagtgagtgtatttgcttatgcagccaaactttctgcgtgttcctctggagactgtcagaccttcgtgtctcagtaactgaaggtcaggacagtctgatctaagcttttgttttggaaaagcatggctggggtggagagagagaggatttgagtcagatctggggtggcgcttatttcttgtgtgtaaccttggccatatttagtctctctgggtcttcatttcatcatctgcaaaacagagtggtgggcttggagatctgctgcccagatcttccttccaagaaggatttgctgaccacctggggactgtgtgatcagcagccagcctctagtcctcaactccacgaggggctgcctcatctgagatcacgcccttctctgggcaacccacatccagctactgagtaagggggaggtgtaagggtccagccctatcttccttctgcaggacactccgacaggctgaatccactccggagcccaccatcaaggcctacatccctattccacttcttcccactccagcttcctcccttttccctttgcaggtattgatccttaataaacattgtgcaccccaaactccatctcggtatctccttacagagaaccaaacctgtggcaaatagggataatgatttttacttcaaaaggttattgtgtgaaagctaaatgggatgtttatgtagtatccaacattgtgcctggaacgttaacaaataatgataaatacctgttcctttttcttttctttccctcacaactgtgactcaaaatcccattctgggcctcgagcaggtgttcctaacctgtgctctgtaatattggtttggaaaaagcccagcaaggcaagtggccctgaaaatctgtgctgcggctaaatctgagatcctggctgatggcttcagagccaattcttgtccctgtcaagttcattatccatggatcacgtcagccctcttcaaggttcctcactgaaaagaaattgagcatgcaaatactcttttatcataatcaccacgtatccacagggtaattcataaaagagctggaaatatgttgaaattcaatattgttttagtccaaatcgatattaataattgtttgcatttttaaagtgcaatttgcaattgaaaagtgcacaaagatcaaccagtagttgctaacacatcaaattttcctattaaaggcacagtcccttaactttaaaatgtttcttatacaacaggggctggagctgatccatggaaatgactatctcttatttacgtgcacaacattagaattggcttccattctgcatgagctgaaaggccagtcacttttatttgtaagttttgatttctttaattaaatttttaattttgagataataatatattcatatacagttgtaagaaataatgcagagaaatcccatatatcccttacacactttccccaattgtaacggtttgcaaaaccgtagaacagtattaaaaccaggatattgacattgatacggtcgagatagagaacatttccttccccacaaggatcctcgtgttgctttcttcagatctttaaaaattaaagatttttgaaggaaaaaggaccctgttagatttctgccttgaaacgatagctatcactaaatgaggcactgtcccagctgggctcagtggagttcacacagaggaatggtcccctaggtcaggagtagcccaggtggaactcacctcagccagggaggcctcaggggagcacagctttgcacatcagaaagaacctgagaacagttttcagtttgacacttgcagtgtggcctttgatccctcaaacaaggacagggttgtcaagaagggaaacagcttggctgggctcatgtgggccacaggggcccagttatcccaggaacagggataactgttccttcctagagtgtagaactctggggcacagccctggcagcctccctgaggacatgtcatgggaccaacccagttccctggtgagggacaggcggcaggtgtgggtgaggggtgcccttgactgaagcctacctggcatgcttgaaagtaaccctatgcaaatgaaattcacaaggtgcctccctgtttcaagacatttgtctcacaccagagctgcagggaacttgggaactcatctacagcaggtattttggatgaggactgattctgagatagggaaactcaagtcctgaagatcagacttaagtggaggggaagtcaggccagagaacctggggtgccctgctctgagcctgatggctaccctgtgacatccagatgccttgttcaagctgcttccactgagggttttgggttttgctttttttttttttttaacggagtttcgctcttgtcacccaggctggagtgcaatgtcatgacctcgcctcactgcaatctccacctcccattctcctgcctcagcctcccgagtagctgggattacaggtggctgccaccatgcctggctaatttttgtatttttagtagagacgggtttcactgtgttggccaggcttgtcttgaactcctgacctcaggtgatccacccgccttggcctcccaaaagtgctgggattataggcgtgagccaccgtgcctggtgtgtgtgtgtgtgtgttgtggtttttgttgttgtttttttttttttttttttttttgagacagagtctcgctctgttgccctgactggagtgcagtggcgtgatctcggctcactgcaacctctgcctcccaggttcaagcgattctcctgcctggaaaacaggcatgcactaccacatgcagctaatttttgtaattttagtagaaatggggtttcaccacgttggtcagactagtctcaaactcctgacctctagtgatgcacccagttcataatcatttttaagtgtacagtccagtggcattaattacattcacattgttgggcaaccatcaccactatccatctccagaaccttttcatcatcccaaacagagactctgtacccattaaacaactccctgttcctccttccagtccctggtaacctgcattctactttctgtctctatgaattggactactcctggtacttcacacaagtggaattatacagtatttgtccgtttgtgtctggcttgcttcacttaacatgatggcttcaagagtcacccatgttgtagcatgtgttgctatcattgactttttgattgacacatgcaagctgtaattttttgggggggttcctagcatcacaatatattttaaaggtttggggatgcattagtccacttttgtgttgctgtaaagaaatacttgaggttgagtaatttataaggaaaagaggtttaattcgcttgtggttctgcaggctgtacaggaagcatggtgttggcatctgctcggcttctggggagggcttcaggaagctcacaatcatggcagaaggcaaagtgggaggaggccggtcacatggcaagagaaacagtgagagagagatgagtggggaggtcctagactcttttaaacagtcagatttcacatgaactgaatgagaaccaactcatcaccaaggggatggcaccatgccattcatgagggatccaccctgtgattcagtcccctccaaccagaccccacctccaacactggaaatcacatttcaccatgagatttggaggggacacatatccaaaccatgtcaggggacaatcagtcaattttgtggcatctcaatggtgtgtgtcttttgtgtaaacattgcacctgttaatgtgtatgtatatgtagagggagaatcaacatttgtctttaaaagtgtatttgtcttcaagctctgtgatctgaaatctgtcatactgacatgaggaggcaaaagtgaggtcctggtggcgagcgggcctcgggtatttcaagctttaaggctccactgggctccctgggggccgtttcttccttgcttcttccttgcctcctgtcataggattgggctactctttggacctgattccaaggcagctctgaggaaaacaaaccctcagctccctgaaacatagatgacctttttaaaattccaggttcatggagtgcctctctccagatggccccaaacacttccatctattaactcgtgctcattcaacgtgcagcagaggctattgatcaccttccctgtgccggggactgtgctaggtgctgggaatacaaagatggggagaggcctcgatgcgattcccgattcagaggcaggtggcaaatgcttttcccacagtgagggaagggctgtcaccgcgatggtgctctcagggaaccaaggttcacacattcagggaattcggggcactgagtcagcattctagactctgccaggatgaggaggagcaggggactcagtttctttacatgcagaatgactgtcccctgccctgccccactggcataaaatgtcctcaacatgtaagaagccctgggcagagatagtgtccagggtgtggtcagttgacgtggcctgtcagtctttggccacgctctcaggcccccctcgctgtggctgtgtgtttgcaggcgcccctcagactccaactggaatgtgtccgtgatggtgggaggccgggctgtggtgctcctagtagggctatggtggcaagctttaggaccttgtgagcctgattcacccggtaatctccacctcggaacgccctttctccccgctgcagagcatggggctgggggggagtggagagaaccctgccttgtaacagggcagcggacagcaggtaaattgccttccccgggagtagcgtgccgcccggcaggggcctgggtgtgccaaggcccggctctggggatttcaggacccaggccagcgctccccagcagcagggcaggaggcagcctgagagtcggcagccccgccttggagtctgagcactcgcgcccatccgtcaaccttgcagagcattgcaactttatgcctacgcataaaaactggagggactcgtcccagagtttgctgccgccgccgccgctgccattagagcggttttaattagctgcaggatttttaatgagctgaaatcaagaagagccccatctcagaagtaagcgagagccgcgcgcagggaagaactagtctgacaaaacagaaggaggtggtgctctcgggggactgggctgtaggctcccaccgatcgatcggcgacgagcagatgagttcccgaggccaggaggctgaggagggaagccagggctcagagaccagcgcccggtgcagagtccccgctgctgccaccgcggcagaaggcacggtgccggattcaaggtgacggcagtgcctggctccattctcctcaagttgccatagcagcctctctcccaacaagcagcttctccgggagccctcagccgggagggacgtcattgttctctcctgcccgtgtggtgcaaggagacccaccggacagagaactttcccgagcccggggtccgctgaccacgtgggtgcacccatgctgcctggagccaggcacagggacaggtccccacggccacagggaatcctctgggcagctgaggggagcgtccaggcccagaagcagctgcagccaagcgtgtccttggagccgtccatgcgtctgtccgcctgctgccggtcgccactggaggtgcgtgtgttttggctgaattcccaagtccttgcttgtgccctgaagtgaatttcttcaaagagacacatttttaaatcaaataaataaggaaatgggaggaatccttcgccctgccctgtgtcccaggaggggtttataagattaattggatctttttttttttttttcttaaagtaaaaattggtgacgccattcaggcctgggggagaaaagccaccaggaggactaggaattgtgaggccaggcaggagctgctggaaactcgctggggctgtttatttttcttgcctgaaccctccctcttctctgcccctggaaggctggattttcttattgtctgttggtcttgggatgggtgtaagcaggtgaaggcaggttttgcccttgtcatcggagctgagagtgatatagtctgtgatgaggatgggacagtcccaggtggaggctgaggcctgtgactgtgtttatgcctcatcccccagccttccaggccccagcctgtgacagatggtggtgtccactccccaggcagcagctggactcccaggagagggagacagacagctcttagaccagcagctcctgttgccttgaaaacaacgtgcgacttggaagcctggggtcctccgaggaacaatagaggattctacaccccctggaatgcccggggatctgtcggtgaccaccctcccttcccacaccttaggggaaaggagtgttctatagagtccagttggccagccatactgctggccagttacccaggaggggaggcacgctgaccttttgattcctgtttgcacggagcagggagttagctggtcagatggtccccagtgagaacaaacacagagctgagggtcccagagggaaaagctggggtctgaggcttaggggctaaaccctgaagccacagacggctccaatgccagcttccctgggtatagagagagggtgttcgtgttctctcgggggccagcaaaggcagggtctttgaaaggggaaacgtgaacagatgaagctccaccaccatggaggtgtggtcctgggtctgtgtcttcttccccttcctggatttgggggcatggatctggtccttgccctggctcccaggcacatgggtggctggagccaggcatcatggggtgggtttggtttggggcggttcagaaacaagtgaggacaggtcttcgctgcagacccatttagtccttgacagtggatgtcggtactggctcgaatggagacagactggggagaagagaggaccggccagctctcttgtaaccactctgcagcgccagctactgaacaaatgagatgatgatcacacatgctcccgagtcccctttgttcatcaggtagagcctgatattgagggacccattattagctgttttaccaggcagttctgggcgctagccatgaagctgttctccttcctctctccctccttccaaaatgtcttgatgttggaggctaccctaggtcaaactggcttcccggtgtctgactcaggaggctgcaggaagcgcacccacaccgtggccagcttactcaggggctcgcgacagttgctttccagctggggccttgctggggaccatcgatggtatgtgtgcaggcactggccggcatgcacccgggcatgtatgcatatgtgtgttattgaacccgcgtctgcttaggtccgtgggtgcggtgcacatgtgaacaccgtccccatgaccgtgcaatagcagctgctcccgagagaccttgcaggttcttcctggtccccatctgagagccatggcccccctgtgtcggtgcgtgacatcttttccattcttctaactcctttctatgactgcctggggctcccccgagtgaggctggagagaacagctttgcctgccttgtcagctgctcactctctcctgaggctttggggctggccccggtggggctgggactctgcagtgcagtgctgtcctcacagagggaagggcttgggggacggtagggcatcgcagcctgctgtggggcttacagtgctgcatctgtgtctttgcaaggcagtgaaccccaggtcctcaggatggcctcatccagggcagccatggagagagaggccccagccccgcacaaggggctttgagtctgagcccttggggacacatgagtgtccatttctactctttgcaggcaaggcaggggtggcctcggtggatgacaggaagcagcagtttgtctttagggcagaggccattgcagtgaggtcggagccagcctgacaccccggagccagctccagagacaaaacaggcccagctcagtgattctgtaaaaagctggaaggccgcaggaaccaactgctcggcacagtccagatagcccagcgtcaggtgccttcccggtgcggagaggcctggggcgggttaattaaagttaactgagtgaaaaaataattatagaaactgcagaggggagaaacccaaacctgcaatttaccctccctagcccttgagcttttcagaaccatctggtcgtggggagtcgtgggcaggggagcagggagagtgcctcttcccatctctcatgctccatggactgggtgtgggggcttctttccccagtgcctgggtccgtgttggggaggagtcacccggctgaagtattgtccctgggcagggagatgtccttgggccgagcagcatatttgacctggggcttaaacagccacccagctgtggcctcagaggctactgggagctgcctacctggcctcacctccctcaggcactgacctgtgccagggtggggatgttccctccagcgctcttgggtggaaaaagggtgatcctctcggcctagccagcaaggcccgctggaaagtaaggggacagagtgactgaccttcaaagcggggttggggggtccctagagtgcctgccgcctgtggctctctccccctgtactctgcccatgccctctctacacaccactgcaggaacttatattcttcctttgggcaaatggccttggggtgcccccatctccatgcacagcctggccctgttggcgtgactggctggtatgtgggggatggggaatttctctccctgccctctaggaggaagcggggtaaggggtgagtcacatgggtatactctgggtctgcagtggctggagcagttagtgcccacccccaggaacacgagggggtgttagtacccagcctctgcgcctctgagcttggagtctgttggacacaggtctagctgccccacctccactccaggcaaagggcctcgagcacagggactccagtggtctggccagagcctcagctccctctggtgtgactgtccagagggactgacatacgccaacccatctgtcagtccatcagtgaggacagccctggctgtcacaggagagtccgtctgtgcttgaatatcctttgagcctagcaggctccttttcagagctgcctgctctatggagaccttgtccccagtgccctacagagagaagcagggtggaggcacatccaagagcttctctgcccaccgggccgggtaccagggacaaggacccaggttcccgccagtacctaggcccccgccctgggagcacgcatgcttatttggaggcctggacagtgcagggggtggctgctggttactgactgggggcctggaggttcccaactgggctccccaaggcagggccagagggtgtctcattccatgatttgtccagaggtgcagatacaggagaccctggtggaaagctagcattccagccacaggtgggaacaggcttccctcagcctcctgggtgtgaaaggatggaaagggcacccctgggtaacttgtagagggcagagtcatccggggattgcacttggattgctgcagtgagcagggcctacacctgcccgggtgcctcgcgcctcggtgatgactatccctcctctgccccgtagatctcggcctgatggacgcctggtgtggacgatgagggaagaacgtgccccccacacccaagaggtgacccctgagccagccccggatgaccctgcgacctggaacaatgcggctggcctgcatgttctcttccatcctgctgttcggagctgcaggcctcctcctcttcatcagcctgcaggaccctacggagctcgccccccagcaggtgccaggtgagtccttgcgctgagtcctgccatcactgcccccagctttccagcctgaagctcaggcctccacagctgccctggtgtgctgggcttgggggaaaggggcaagtctgtgccaagacccccggcaggcagagtcctggcttcccggggaaggcgttagtctcaatgtgggagtgctgtgtctgatgcaagacctccagccagtgcctagcagcagggtggccccttttgggagtcatggcaaggctgctgtctattgagccagttgttgcccttgatgaaactcagatttaaacaggattccaccacctctcaggcctcttccacattgtcagggacatcagaaagtagacaacttctccctgagcccatgccccacaagcaagactcagtttccctgcccagccctggggaatctagcctctctggtctggacaaagggggtcagggtacctcctggtttagtgaggccaagaccccctccgagggtcccccactgctacttccattccacccctgcctggtagcccactggagtcacagagggctgctgggaacaggtgggatggcagggaggccagagcaggaagggtgattctggcatctcagggcagacggagtgtggagagggagttcaggcaaggtttctgctgccgggacacggtccccatccccagagatatggaaggacaggaggtcagctggcagggtgccaaggcctgggaactctctgctttggagggagaggaggggaggtgtctcagcagtggcccctgttaggggcagttccatgaagccacacactcacagtccacatgctctagggcatggacaagctggtgcacccccagagacaccgctcctctgcagggacacccactcactctctcttgcttgctcagtgctgtgatccagagacaggatgaaagagaagggggccagaggtgtaggcagaggggttgctgcgtaaatccctgccggaagcccagagcacaggaaggggtcttactctgcaaccgctccgcccccattatggacgagcacccatgatgtgtggcctttagtgcagattgagggcctgtgggcaccaggaaggaaggtgaaaagagcacaaggaggccagagctggggccctgggtctggcagctgccagaggctccccatgggcaggcgaatgagttgagagtcagagggaggcagccaaggcggtggcctccaggagatggtgggcgagtcatcggtgctgactcacgcctgtgccgggcccccacaggtggtggctgtcagaagtgggtctggccgctcccaggcgtctggagcagcaggtgcgcagcagagccggctctcctgtgggagctttgcagcctcacatgagccccagaacagctcatgacactgcattggcagaacagggcccctcgggacagcgccaccagggcagacagcgagctggtacctaaggtcatgtgttatctgcatagaagcacagtcaggaagaagggcgagcaaacgctgactgggtgtgtccttggtgtgtgcgtggttgggggtgcatgtaggcagagggtccaggcggccagtacccacattctgcaggaggagcctgggagaggaggcatgagtgtgcctgtgatgcccacctgggaccagggcctggacccatcggtgggacactcctggatgggactgtggtttggtggcttcagctagtgccctgccctgccgcagcaagagtgctcactgcgcaggtccctgttgccctgcccagcttcccgagtgcacatacgtgtggattacaggtgggctggggacccaggggacggctgggatttctgggaagatcggatcctcaggctggcaggggatgtcagatggcacggagccgaggccatcatccctttgcagctggcagacctggcaaggagcacacgtgggtcttctgatggtccatgcagccagaccaccctcaccacgtgccaggtgatgggcagacttgacggtctgggtaaatcacaccaaacacagtcataaaactttaagtaatgcttacgttactttccctgagcaaagtgcctctgacacaggctgtttgtgttgatttgttactattcatttattccttccctgtacttctcacggcagcctaattgtgattcggtaccaagaaagcaatatcaaagtaattttccacaacattagttacattttcttctgatctttcaagtgaaacaatcccatcctgttggcttctctgagcatataaaccttgattacatttatctgttggaaaccagtgcttacaaagtgtatgtgtccagttgcatggctgggtggccccaagggcccttgacaattctccctgtgaatttctgttggtgggaggaacacattctgggagttgccctgccatcctgatcaggcaaacaggcaggtgttggggtggagggctgggagtggagatgagcggatctacggaggaaattccataccatggcatgaactgtcctggggacggagttctctgggagctgcagtttgtggcacaacaaatgtagaaaggggatggggagtggcgggaattctgagttgcttgaggtcccttggggcctggcctcattcacgtccctcccacgcagccaccggatattaacagcacctgaactttacatggatcagccagccaagctcacctggctcaggcagtagatggaattgtagggggttgccagacttttgtaaatcaaaccacattttaaacattttttttttactacagtccaaatcaaatctttggaaacaggaagagctacccagtaagctatccgatgcgaagatgaagttttgtgtaacagagaattcacttctccagttataattcttttccagtctccaggattgccaggccctgaggccagagcttctgctttcaggaaattcactttttgacccagtagacaagacttacctcttctccaagagaaagacttggagaccaggccagaaccaggaataacaaacaccaatggccaggtgtggtggcacgtgcctgtaatctcagtactttgggaggcctgggtgggagaatcacttgagcctaggagttctagaccagcctgggcaacatagcaagaccctgtctctacaaaaaaaaataaataaaattagctgagtgtagcggtacacacctgtagtctcagcaacttaggaagctgaggtgggaggatcctttcagcccaggaggtcgagactgcagtgagctgattgtgccactgcgctccagcctgggtgacagggccggactttgtctcaaacaacaaaaaattcccaatgtactggctctgggggctgcagaaggctgactccacatttggtcgagcaaactgaattttacgagctgctttctttgtgaatgttttatcatagcgaatttggaacacatgcagtagtggagtaggatagtgccatgaacaccacataccgggcacccagcaccccccaccaacaccaggctggccccatccatagcaccatccacttccctcctttcatgtgatttttgaagtctataccagacatcctatcaattcagctataactatttcttttttctttctttctttttttttttttttgagatggagtttcgttcttgttgcccaggctggagtgcaatggtgcgatctcagcccaccgcaaactccacctcctgagttcaagcaattctccggcctcagcctctcgagtagctgggattacaggcatgcaccaccacccctggctaattttgtatttttagtagagacagggtttctccatgtcggtcaggctgatctcgaatccccaacctcaggtgatctgcccacctcggcctcccaaagtgctgggattacaggtgagagccaccgtgcccagcctcagccataaatatttcaatatatttctcagtttaaaagataagaactgttttattgacatcaccactgaactcattccttaataacatcaaatttaatgattcctcaatagcatcaaatagtcagtcagtgtgcaaatgtctgtctcacaaatataattacctttatttccaatttgttccatccaatatccagaaaaggccctcacatggcagttggtggatgagtcttttaagtctcctttaatctgtaagtttccttctccatctgtattcttctctcactatttatttgaggaaaccaggtcacggttcctatagaactttctgtaaattgagatttggctgattgggcctgtctgataaggattcacgttgttctctgttctttgttgtcccaataaattaggtgaatcttgaagcttgatcagatacaggtttggattggtttttgttttcttctaggggagttttgggggacaggaattcatgggtggttctgtattattccatcaggaggctcctgtctgcctggctgtcttatgttatcagccgccagagatcgtgcctagatccagccattcattaggggttacacagtggcaatgttctgattttatcactccttcttcattcttttaagtggaatggattttgttttaatggggcaaggtgagtcattgtcagtgacccatgaagccaaagtgagtggtgtggattgattggtttattcatagatatgtatataaaactacaatgttaccatacagattctgttgtagtttattcatatatatatatatatatatatatatatatatatataaatgcaatgttaccatacagattctattgtagtttattcatatatatatatatatatatatatatatatatatatatatatatatatataatgttaccatacagattctcttgctggcacactgtaaatagttcgttcttttaatgtttggcttttgcagagtgagttttctttaagtggggctaccccatgtttcagagccctttgccttttcctggagtcaaggagttgtgggtggtggttctagggtgcccagtggggaggcagctgtggtggacagcaaagatccccctcagggacccctggcacagacaatgggattggacagcccccgatgactcctaggtctgtggcctgtcttggggcactcctgcagggcatggggaaatttaacgatgaagataataatgaatattgactgaacatttaccatgggccaggcctcgtattgagaactttacttttttgagacagagtctcgctctgtagcccaggctggagtgcagtggcatgatcttggctcactgcaacttccgcctcccaggttcaagcgattctcatgtctcaacctcccaagtagctgggattacagctgtccaccaccacacctagctaatttttatctttttagtagagacggggttttaccatgttggccgggctggtctcgaactcctgagcttcaggcgatctacctgccttggcctcccaaagtgttgggattacaggcgtaagccaccacgcctagctttacatgttctaatgcatataatttcccttcccttccctcccttcccctcccctcccctcccttccccttctgttcccttcccttcccttcttgaggcagggtcttgctctgtggcccgggctggtgtatagtcttgccatgaaagctcactgcagctttgacctcctgggctcgagtgatcctcctacctgagccgctgagaccacaggcagacgccactacacccagctatttattttattttttatacagacaggatcttaccatgttgcccagactggtcttaaactcctgggctcaagtgatctcccgcctcagcctcccaaagtgctgagattacaggtgtgagccaccacaactggctaggtatgattcttacaaataaacgatgtctagtttgagacaatgtgccagcactcactggggcagacacagaagtagcaacaatactgatactagctaatgctctcaggccctcgagatgagccaggcacaatcacaagcacttttcatatatttaatactcatttactacttttaaaatttcaatagttttgggggtataggtggtttttggttacgtgggtaagttctttagtggtaaattaggagattttagggcacccattcgtcacccaagcagtgtacaccatacccaatatgtaatcttttgtccctcaccccccatcccagccttgtcccctgagtcccatagtctattgtatcactttatgcctttaggtccccacagcttagctcccacttataagtgagaacatgcggtatttggttttccattcctgagttacttcacttagaataatgccctccccatctatccaacttgctacaaaagacattattttgttcctttttatggctgagtagtattccatggtgtatatataccacattttctttttctttctttctttctttctttttttttttttttttttttgagacagagttttgcttttgtctcccaggctggagtacggtggtgtaatctcagctcactgcaacctccacctcctgggttggagcgattctcctgccttagcttccttagtagctgggattacaggtgcccaccaccacacctggctaatttgtgtatttttggtagagacagtgtttcaccatgttggccaggctggtctcagattcctaacctcaggtgatccccccacctcagcctcccaaagtgctgggattgcaggcgtgagccaccgcacccggtcaccacattttctttatctgctcattggttgatgggcacttaggttggttccgtatctttgcagttgtgaattgtgctgcaataagtatgcatgagcatgtgtctttttcatatgatgagttttcctctgagtagatacccaggagtgggattcctggattgaatggtagttctacttttggttttttaaggcaggggtctccaacccctgcgttaggacccaggccgcacagtaagaggtgagtggtgcgcgagctatcaaagctgagctcggcctactgtcagatcggtggccacattagagtccagaagagctcgaaccctcttgtgaactgcatatacaagggatctaggttgtgcgctccttatgagaatctaatacctgatgatctgtcactggatatattacatgtaataatatatccatgtatatacattatatattacaatgtaatagtaatagaaataaagtgcacaataaatgtaacgtgcttgaaccacctcgaaaccaccacctccccacccccatctcccttccccagaccgtggaaaaattgtcttccacgaaactggttcctggtgccaaaaatgttggggaccgctgctttaaggaatctccacactgtttcccatagtggttgtactaatttacattcccaccagcagtgaaaagcgttcccttttcaccacatccatgccaacattattgttttttaagtttttttttttttttgagacggagttttgctctcgttgcccaggctagagtccaatggtacaatcttggctcaccacaacctctgcctcccgggttcaagcgattctcctgcctcagcctcccaagtagctgggattacatgttctaatgccaccatgcctggctaaattttttgtatttttagtagagatggggtttcattattttggccaggctggtctcaaactcctgaccttgtgatccacctgcctcagcctcccaaagtgctgggattacaggcgggaaccaccttgcccagcctgtgagccttttgagaaatgtctattcatgtcctgtgcccactttttgatgggattatttgtttttctcttcatttaatgctttatttttatttatttattttttgagatagagtctcactctgtcacccaggctacagtgcagtggtgtgatctcaggtcactgcagccttgacttcctgggctccagtgatcctcccatctcagcctcctgagtagctgggaccacaggcacccccctcttcacacccgtctaacttttgtatttttggtagagacggggtttcgccatgttgcccaggctggtctcgaactcctggcctcaagtgatccacctgcctcgtgctcccaaagtgctgagattatagtctgagccactgtgcccggcctcatgtaatactttaaaacccctatgagtgaattattattacaccatttgaaaaatgagactattgaggtaagagaggctaagaaccgtacccaaggccacgcagcttctgggcttcagagctaggatgtggcctgggcggctgcctgtggttcactgtaccacactgtctgcccagcacttggggtacccagtattgttgtgttccggacctggagcagagcctgggcagagagaacagtgtggataaaggattggagtcctgagagaatgcggcacgtggagaactttaagtgatttaggggctgcagcatgacctgtggatctagactcctggctgaagacacagccggccctgggcccagcaggcccttgcagtgtggtagaggatccagccttggcctctggcaacaaggagctctggggaccccggagtagggagtggtgcatcagaaagctcattctgggctgggcgcagtggctcatgcctgtaattccaacactttgggaggctgaggcggtggatcacctgaggtcaggagttagagaccagcctgggcaacatggcaaaaccccgcctctactaaaaatacaaaaataagccgggcgtgatggcatgggcctgtagtcccagctacttgggagactgaggcaggagaattgcttgaactcagaaggcagaggttgtagttcttttaaaagaactacaatcctttatccagtgagctgagatcgcgccaactacaatcctttatccagtgagctgagatcacggcaactacaatcctttatccagtgagctgagatcgtgccactgcacttcagcctgggcgacaaagcgagactccatctcaaaaagaaaaaaaaaaaaaagaaagaaagaaagaaagaaagaaagctcattctggtggctgcctgttgtgtggccgtgggcagagagcagacagggagaggcaacaaatgcaaggagattgggggcagccaaggatatcgcatgcagtgttggagacctttcaaatgagaggacaaggaggtgaggagggcggggagggcagtggtcttggttcagggggacttgggtttctggctctagaggagggaggttgggggtgccattcactggggcagatgtgccagatggggagaggtcggggcaatggggcaagagatcacaggttccatttggggcttatggtgtctgagatgcttggcagggtgtgtggagtctccctgtagctcctccaccgaggggtgtccagccccacagaatgaaggaccaggcaagacaggcaggaagcccccaccatgccctcgcccctctgcacctgcgtttccactcacaggtcgacacactcactcctttaccctcatacaccccaggcctggacgctggcaccatgcagggtggggagggctatgggagagccttgccctgggagaggggctggcagctctggacttacatctactccacatttccaggccaggaaaccagtatcctggaagctgtccctgctccccgttgggctggatgccagcatggagattcatgcttttcagcccaaacctcacattgtcctgggatgggacctccatgcctgggtccctgggcttgccagccacagggagagatctgtacatgcccatctgtgtgaaggccctgcaagcccagccgcttagctgtaccgaggcaggggaggggtgcacagggagatggagacacgggaggaggaagctcgggctctgctctcgggagctcacaatctgtgggggtcaaggaaggaggttatccaggcccttccttacagggttcccaatctgggggcagtggaggggagacctggccctggctcagcggcgcctgggggacacttaaggcaggttgtaaacctttcttgagaggtgagtgctgaaggagccaggaggacttcctggaagaggggaactgtgggctgcttgtttgtcctctctagtgaacaggaggtgctgacctccaatggaagcagtgaagcgggcttgggtgagattccagtggagccaggggtctccctccgcagcacgtgctgctatgcgtcatgcctaatatctcacagctagaaatgaatagagccagaagtccaatgcccgcgggtctgcctgatgccggggctcttgttttgatgtcctggaggcagcgctgtgttgattggagaaagtgtggccttcactctgcgtcccagggttaccagggacacactgccctgcctgtgcctgttcggaggaccaaactgcaatgtcagaaggtctgtccagctcctacagtgactgtcatgttctgagtgtgtccccctggagctctgagacaaatgccaggacaaatgtcgtgggtgggccaggaccacaggagcgcctgctaagaagctctcaacagctcacccaaaggagggtgatagaggcaacagaagtgcagcggccacccctacctgctctctctgagcagctgggccaggttggctgcaggggaaatatgtctactggccctctcagagagagtccggtcctcgcgcagctgggcgtctaagcccagactccttcctgggctggtacctgcccctccagtttccatggagccggctgctttccccgggcaggtgggttttattggaaccctcttgcgtctgtttcctgaaaccattttctaacggcattgcggaacatcatatatatttcctacaaaccttgggaggctgacacatccttgttgtgactgtgaacatcagaagtgacatgtaattgcagtgatccatcctgttaagtagctggcaatacattatctcaaaatcagcagggctggaactctcagaacccagtgtttctaaacaatgcacctgcagcttcaaactctcttcctgaacagcgcccaaggctggcaagggccacctcgccctcccatgcctcacttttcctgggccacagcagagacaatttcactccagggaaagccacctactgggttttcagtactcctggagtgccttctccttgtcacctaatgcaccaggctctccgctcagggctgtgggtggggtccttgtcacagtgtttcttccaagcgtggctctggaagtcctgccctccttttttctcataaactccagaatgtcttcgtgggggttcctcctaggccaggccagccatcattatgcacaattggaggtggggaggggcagagagggtggccagagcccaggggcacagaaagccaagccccagttgctactttgcacccagcagggacacacccacactgtgctttatgctaattctggggtatggttcacatagattgcagtgtgaagggtgtcccctggagttgtgcaaagaccagtactgatggagggatggacatggagtgctccttgcgtggtgattgcccaagtgccagaaataggcagggtcggaacatggaaccttcaggtctggataccccgagcctagtgggtttgatgcgtctgggcggtgctagctttgggaccatcattgaattctgctgtttgagggtgggggtcatgaaggaccttcactgccacactccctgggaggccctgatttggagggggagcccactgtggaccctgtctctgcagtgaaagtttctcagttcaagcctctctcacctgagcccaggccgttccccttagcagtgccatcctgtgtcttcccagtcttctacgtggccacgatttcctgggttcctccaccccctgcaattggagtgaatattcgcctcttcctgcagaagacaccctgggggtctctagccagagcctcactttcctttggtacattaaaatatgctaaatgaaaaataatgagcatgtaggaagtaataacaggaatcacctaattaaattaggaaacagacatcacatcgctgtaatctgaaaattgatattaatagaaacggtcccagaattgttatgctaaaagttcctaggggcggggaaattaaaaaggagagcagaatagaaaattgggacaatcatgtccaataagagtgagacttatgttttaaaaggaactacagtaacatgctaaaaatagaagaggagatctaatgaagtcatggacaaaagtggctttgaaaaccgcagagctccaacgcacgtgtatgatggtaatttataaaatgagacaatgtaatcaagcttcaatgtgcatgaaatgtagtcagggttattgtttattgggtgcctggcacgtggtactcattctattttccctcgccctcctcggcaggcgtctttatcctcaactgaaacttagggagattcattcatttacccaaagtcctgaagcctgcgtggctcagccaggatttgaccccagatctgcctgattccaaagcctgtgctcccccttctctgtccttctttccttttgctattagttaatgtcatggtctatatgtttgtttgtttgtttgtttttgttttttgagatggaatctcgctgtgtcacccaggctggatctcagctcactgcaacttccgcctcccaagttcaagcgattctcctgtctcagcctcccgagtaggtgggattacaggcatgcaccaccactcccagtttattttgtatttttagtaaagacggagtttcaccatgttggccaggctggtctcaaactcctgacctcggtgatccaccacaggaatccacctgccttggcatcccaaagtgctgggattataggcgtgagccaccacacccggcctatgttttgttttaaggtaaggggtcttgctctgtcacccaggctgcagtgcagtggcatgatcatagctctctgccacctcaaactcctcgatatttcttttcttttctgatgttattctaccatttttctcaaaggacatttcttgccaacacccagcagattgtggcaactgtcagctccccaaaccgaagccccaaggctcttccattggttgaattaataaaacctacaacaaagacaccttctgaaatttcagtccaactggaaaactgggtctcccattatgtgggggcctgggcagggtccaggaggggcaggcggttccgatgcttgtcctgcgtccccaggtagccccagtgttgggttgcgtctccacagtggccaattgttccccagaggacccccgagggggatgaatctggctctgttcacctgccgtgtgagtcacagcccagagggcccagagcaggtctcaggtgtggagtgaccccgttcccactctgcctggcccagaatgcattggagggaccgggggaggaggaagcggaggtcacaatctgtgcatgagatgcctcaggattacctcgggtctggagtgctgggactgctccgagggccaggcattgagcccaaggaggactgaaggctgggggctggggagggatgccacatggctggacttcttttccctcctcctgtgcctacacctcccccacctctgttcccattcactgcctgagcatcttcagtgagagtcacctggcatcagagccaagcctcccgcacagcccagggcagctgccgtggagaggtggagggcaggggagactccactccccaagtggcaccaggctccaaagaggcccgaggtagggggccctttgcccggctctgtccccttcccccagcctcacttggcctggagtctcagggccaagggggagggcctggagacatccagtgggttgaaacggggcacacccactgccagcatgaagaagggcccggtggggtcccaccgtgtgccaaccctcctgatgtcctcgagcccctgttcctaacacaggcagcagggaagtggtgaggagtccacccacgctccaaggacagggctgttgctacgattgctgtccttctccatggccactgcgtaggtcttggttttttaaaactctgaaaaagttacggtggtagttatgacaacagaagcctggaggtccagttctggaggccaaatgcgtgggtcggtaggggcgggcgcgggcccacacaccctggggctagacgcaccttctgctgggctccaactgcctgccggtggggttatcccgctcttgcattgaggttgacaccatttgtggtgcctttagggtcactgcagatccccctctccttctcacaatatttgcagaagttgggagcctctgggcggatctcatttaagccaaaaaagcttcaccattatatgcctgctgatgttttcattatgaagcttattttccaggatttgtggctctgcagttttgacttgaatcatagtggaagtcagtggaagattcgctcattttgaaattttattttatgtggggaaaatagctgagcttaaatcggttcagttgtgccctctgacagctgccactggggagtccctgcacagcgcaggctcctagtggggggtggaggagctcctgggggcttctcatgttcgcgtctggggtcccagagggaagtcgggggctgcctgtcatcttgccctcaggcctggatgaggcatttttcagccctccccaaaaggcctgaagacttctgagagggtgggctggccccatcctagctccccaccaagctctgtgcctggtcttggttttccaccagggcgggactgcagggatgatgatccgtgagcccctcactacatctggttgtgtccaaaggtgcttcaccatgggaaggctgctcctggcattcctcaagtcctggatggagtcccaagaccccatcccacctcctccaaaggctacagccatttatgagtgcatttgacctttgccctcagggtctgggtctgcattggagggaggggaatgaggagatgtccatgggaactgtgcagggtcactgggatccatcagacagtaggcctgacagagccacagggagcgggagaccacaggatgggggaaaggggatggggtgagggggaagtggacagacaggccccagggccaggggccaccgatgctccactccagcccagagctctgtgcaggagtgtaagtccagggtggccaggtcatcctttttgtttttgttttgttttttataaaagctaagaatctggccaggtgcagtggctcacacctgtaatcccagcactttgggaggccgaagcaggcggatcacttgaggtcaggagttcgagactagcctggccaacgtggtgaaaccccatctctactaaaattacaaaatttagccggagttggtggcaggcacctataatcccaggtatttaggaggccgaggcaggagaatagcttgaacccaggaggtggaagttgcagtgagctgaaatcacgcactacattccagcttgggcgacagagtgagatgctgtcttaaaaaaaaaaaaaaaaagctaagaatcggtaacatacatttatgtggattctcctgattttaaaggggcagctctaatttggaatgtgttttttaacgttagataataggtgatgtttggcacctactgttggttggatgggctgggaggactagatctttccaataccctaaacccccgtagggctgagacctgccccctaggccctatttggctccatgcctgctctccctataccccctgggaggacacagaggaggtgggtctcctggtgggaaggggatgctaagaattacttccagccccataggacccccatgaagccagaccccaagcggtccatgagcagagcatctcctgggctccgctgaccaacagtggctgcacagagcccctcagtggcattgtttggttcagcagccgggagccctgccagatacctgttcactgttcaggtcaggcaggggacctgaggggtcggggaggtgactggtcagcagagatacagggaaggcaagggccagagagtggggttctggggagcgcacctaattaaaacctccttcatttacgcacagttactcacatgcaaatatttgcacccactgacaagcttctgttgctgtagcaaaggaagaatcaattcaagcaaagctttcctgcgagtgggcactctctccagtatctacctggagatgcgggtgtgggtgcccgtgggtgtaaatggaggaggatttctgacttggcagcctgcttcccacagtgatggggtgtggcaggcatggccaccctggctccctttctgcccccctagggcaccatggcagccacactcagcaagggtccctttggagaggggcctggcctggcccagcaagggactctgcagattcgccttccctgctgcctctgtgtcacagcgatgtccccagtactaggagagggacccaagagtcctgagagcattcaaggaggtggcatccaggggtgtggtatgggcaatgatgatggtgtgagcactcagtgcctactgtgtaccaggcactgtgttttacatgctttaccaatatcctcatgccagagcctcgctgtacccgtctctattttatagatgaaaaaactgaagcacagagaggcaaagtcacttgcccaaggtcacacagccaggaagtatcagtgcttgaactaaaacccggttcctcagatcccaaaagtctgaagtcttcttggtgaccggacaaccactcagggctgggagcaagcaccacactatgagatgcatggcattggagggccagcctgggttagaggttggggagctgcacggcactgcccttcagactgtcagggcgtgcttcattcctgctcacagcagacatgttctggttcttgtgcacacgtgtgtgtgtcctgatgaagagtcaggtgcccatgtgtgtgcatgtgtgtgtgcatctggccctcacccataatcctagctgtgtacaagtatgtgtgctcacctcagtattactatacacccatgggtggacagatgccttacggttcatgtggaaagcacttcaccctgaagtctgggctggctgctgtgagcgtaccctgacaatgtcacctgccaggtcatggggcaggcaggggcaaatgacttgggccccacagagtgagttgtctgtcggttgtcagccacaggattgggtgacaaattgccattccagcaggcactcagcaaagccaattattgtaaccccttgcccacgacccgcacagaccaaataatgaaattacattcataatatttcaggtcaagtgatcgctgcttgaattagttccttcccagaacccagccagaagtagcggcagtaattaaaggattttctgggcttaaatcaactgtgcgcgtcaagcgtgtacaacacacagagcttgcaaaatgtgtgcaggcctcgtcccttcactggggagtgaaaaggacaggccatgattgtgggaggaccacaggccgggaggaggtgtgttattcctgccagggaaattttccactttcactcacttattttagagacgtttactgaaagatccctgctccaatggggcctcacagtgagtaaggtgatggggactttctggggtccaccctgactcctcccaagcaggtattttagcagtgttgcaggggtagggtgctgtgtttcccagactaaagtgcaggtcagagttcactgcagctttaaactcctgggctcaagcgatcctcccacctcagcctccccagtagctgggaccacaggcacatgccactgtgcccggctaactttccaatttttctgtagagacagggtcttgctgtgttgcccaggctagtcttgaactccttgcctcaagtgattctcctgccttggcctgccaaagtgctgggattacacgcatgagccacctagcctgacctaattttaggataattccattgcccccgccactaaatcttttgtgcccacttcaatcactccccattttcaccctcagccccaggcaactacaaatctcctttttatcactatagcgctaccctttctaaacatttcatatcaatgtaatcatacactgtgtggtctatcatatctggtttctttcactctgcatgatggttttgagagtcatattttttgatatttactcatatcagtttgtttctttttattgtcaaataatattattctattacatggaattgcggttgatctgttcaccagctgctggatacgggattgttgatacttttggccattaggactaatgctgctatgaacattcatgtgaaagtttttatgcaaacctatgttttcatttttcttgggtaaatatttaggagtagaatggctaggttgtaatagtaaatttacgttaaatttaagggatactgacaaactgttggctaaaattgctgtaccattttacattctcaccagcagggtatgaaggttccaattgctccacattctcatcaagacttgttattatctgtctttttaattatagctattctagtgggtgtgaagtggtgtctcattgtggttttaatttgcatctctctaatgagtactattaagcatattttcatgtgcttattagccatttggatatattctttagtgaaatatctattcaaggcttggcccattttaaaaattggtttatttatctttttattgtgttgtaattattttctagatataagtattatttgacttgcaaataacttatcccatctgtggcttgtcttttcattttcttaatagtgtcttctggagtggaaaagtttctaaatttgaaaaagtgcaattcaacatgtttttcgttgatggattatgctttttgtgttgcgtctaagaaattttttcctaatcttagccataaagattttctcttatgttttcttctaagtttttaagttttggctgttacatctgtgtctgcggtccattttgagccacgttttgtgtattgtgtgaggtctgacttcttctctttgcatgtgaatatccagttatcccagttcccagcacgtgctgaagactatctgttccctatcgaattgccttcgcaccttggtcaaaaataaattgaccataaatttaagagtttatttctggaatctcaatttatttcattgatctgtatgtctattcttttgccaatagtgcagtgtcttgattagtatagatttataaaaagttgtgaaatcaggaagtgtaaatccttcagctttgttctttttcaaaaccattttgggtattctgagtcttttgcatttccatgtaaattttaggatcagctcatcaatttctgccaaaaagaacaacacctgctgtgacttgataggaatggcattgactgtaataataaacttgagagaattgtcttcttaacaatattgaatcttacaatccatgaacgtggaatgtctctccacttgtttaaatcatctttaattcttcttaccattatattgtagctttcagtatacaagtcttatctttctttagttaaatttattcctaagtattttactctttttgatgctacagtgaatggaattgtttttctaatttaattttgggatcattcattgctaatatatagaaatacaattgatttttgtatatttatcttggaacctgtaatttgttagttaattctaattgtttatgtaaattccctaagattttctacatacagaattatgctctctgcaaataatgagatgtttacatcgtcatttccagctcgaatgccttttatttctttttcctgcctgattcaactgactagaacctctagtatggtaggaaattgaagtggtgagagtagacattcatgctttattccggatcttaggggaaaaacattccatctttcaccaataagtataatggttgctctaggatttttgcaaatgacttttatgaccttcaggaaattgtcttctattactagtttattagaaaaaaaaatttaaccatgaataggtgttggattttgtcaaatacttgttctacatctattgagatgtttatgttgtttcatcctttattctgtcaaaacggtgtattatattgatacattagcctcacattcttgtgataaatctcacttggtcatggtgtataatcctttttatatgttactgaattaagtttgctcaaattttgttgtggattttttttttttgagggatagttgtagttttcttgtgatgtctttatctggctttgctatcagattaatacaggatttaaaatgaattgggaagtatttttacctcctcctaccctatttctctggaatagtttagggaggattggcattatttctttttaaatgtttattagaatttatcagtgaagatatctgagactagacttttctttgtgagacattactttttttaaagatggagttttgctattgttgcccaggctggcctctaactcctaggctcaagagaacctcctgcctcagcctcctaagtagctgggactacaggttcatgccactacacctggctccagactttaaaattttaaatttctagctcaatgtcttcaccatagttctattcaggttttctatttcttcttgagtcagctctagtaatttatgtctttctagggctttgttcatgtctttctagggctttgttcatttcattcaagttgtctcatttgtttagcataacagtgttcatagtattctcttataatcactagtgatgtcctcattttcattcatgatgttagtagtttgtattgtctctctgttttctttcaaagtctagctaaaggtttgtcaattttgttgatcttttcaaagaaccaacttttagtttcattgtttttgtctgttgttttcctgctttgtattttattatttccttgctttagtttgcttcaggtttagtttgtccttttttcctctcttttgtttgctttatttgttacttcctctcttttgtttgcttcagatctagtttgttcttcttttttcatttcttaaggtggaagattaggctattgatttgagattcttcttttctaatatagacattactgctataaattttcctctaagcactgtgttagctttagtcaactttaattgtctgatttccagatcttcttattaaatttctgtctgatctgctgatctattggttctaccaattttatcacaaccttgggctagctaagatttttgaattattttcagcaacactcttgggcatggaattttccaatcaatcaatgttcatgcctgattccccttggtagaatgtaagcccccagggaactgggcaaggtgatgaaagcagccccaggctacaatgccataacctcacactgttcagtagattttcttgaataaacgcttcttgatatgttgtatgcttttggtcaatttctggagtttttttttttttttttaaggggtagggtctcactctgtcacccagactggagtgcagaggtatgatcatagctcactgcagcctcaagctcctgagctcaggcgatcctccctcagccccccaagtagctggaactacaagcatatatgaccatgtccagctaatttctttattttttgttgagagaggcatctcactatattatctaggctggtcttgaactcctgatatcaagcaatcttcctgccttggcctttcagagtgctgggattaccagtgtgagccaccatgcctggcccaaactttttaaatggtgatggttgttgtttttcctgttccgtcatttcattttgggaaagaagctaccaggcttctcactcagctctttcagaagccctaagtctaggactggggtcttgatatctacacagacaggagatgaggtctctgactcaaccacagtgctgagctggaagtgcaactgctctgtaaatagagccctcagaaggtatcagaacctctggccattggtggagtatgttgggacaatcctagtttacacctgtggcctggtgtaattattatcagtgcccccttactctcagaagtgggtttatttgatgataaatcatatggtcattgtgtagtataaattattgtatacttctgtacttctgtaagaagaaaatgcaaccagaaagaatggatacaagaagtagtagtaaggaaataaattgtaggaacattgttaagtataaataagtatttactttttttggtgagacagaatctttgtcacccaggctggagtgcagtggcatgatcttggctcactgcaacctccatctcccaggttcaagcaattatcgtgcctcagcctcccgagtacctgggattataggtgcacgccaccacacccagctaatttttgtattttttagtagagatggggtttcaccatgttggccaggctggtctcgaactcctgacctcaaatgatctgcctgccttggcctcccaaagtgctgggattacagatgtgagccaccacacccagccaatatttactttaaaaataataaacactaattttgccagtgtgtaaggacagcgacaacgtggaagtttagacaggaaaccgtaattggaatgaaaaggtctataagatctttatgttgttagggaagacaataaggatagtaaaacaaacaaagaaacaaaaaccaactttggactttatttaaaacaaggctagtcactggaattgtgatgtatattttctggcctctgcactgacccctcccagtagagcccactcctagagctgggtggctgtttaatcacttcccgttcacccgattggtgaggggggattcccatccatggttatggggatggccagcactcaacactggacagaagagatcaacagcagtttatttgttattatgcccaagcctgggggaggaggattgcaggggttgcactcggaaacagggtggacaagcgggggctgtgggaggcaggctttgtagtatcaagaaggtgaggtgacccctggttgctgtgggaggatgtcatgggtttgtttgaataattccatgggcgggcagggagtgaaacctgctacttgtgaatcagcaggcactgtgcctagtcccttgataagtaggtcatttggctgggggacttatccaagcgaacagtggggagaggaacttgccgttagtccatttgcagccgcccacacttgctccaggtgtcaaggtagcacataattttaagggtcttaactttaggccttgcactgcagcggcagactgtctcacaggagcctaagggtgggagcactccctctatcctgagtaggggctgacccaagccaagtgagttgaggaggagactccttgcccgagtctcaaaacccccacccccaactttggtgctgggatcccctgctcagtgtctgccctgatcaccctctgccctctcactctgcctgtctgtatattggtctctaccatctgtccatcttcactttcagggacgtgctgtcaaaatccatagccctggggctcatttgtggctcctccttcaatgatgtatatggaggctggccaacccatgtggccctcgccccatggagagcagctgggcatcgttgatgaggtgctgagcccagcatcgggtggctggcactcatactccccaccagccataggcaaccccagcctcctctgacataagcccctccatccctgacacacatgagggggtccatagcctagcagtgctcactgtcatcccaagacctaatgtgattctgtgggtgggtgcaggtgaagttcacctgctgcttctcgctacccacagcagtctgtggagatgccacatcttcctttcaagatctgcgatctcctaatggaggaaggaggattggctcccctggtaggccaccatcacctgggagatgcaatggtgccctcccaggggagccaattatgcaatggcatgcttggtgagtgacattctcatgaacgccactgcagcctgggcagttggccaagcagctgcccacttccctcttttcctacagggtctccatttctcctgggagcatatagctctcaggcaaaacctgagtattctgagttatgtccactggggaggctggcactggggctttttttgtttttgtttttgtttttttgagacagagtcttgctctgttgccctggctggagtgcagtgacaccatctgggctcactgcaacctccaactcccaggttcaagtgcccctgtctacctcctaaatagataggattacaggtacctgccaccacgcccggctaatttttgtgtttttagtagcgacagggtttcaccatgttggccaggctggtctcaaactcctgacttcgaacgggcacccgccttggcctcctagtgttggaattacaggcgttgagttaccacacccagccactgggggttttgaacctgccactcttttgagctgcagaatccctgacagagcctggctgaggagtgcagggctgggggcaagaacagccagaacactgtggcttccttcaatctacctgcaccaggaggggcaggcgttgcttagaacaacagttctcaaccttgactgcttgttaggatcacctgtggaggtgttaaaaaccccagtgtcctctatggaaaacagtatggagatttctcaaacaactaaaagtaaaactaccatttgatcccgcagttccactaccgggctatctacccaaaggaaaagaagtcactctataaaaaagacacctgccttatatttcttgcagcagtactattcacagtagctaagtcttggaatcaacctaaatgtccaccaagagagaattcggtaaagaaaatctggtacatatataccatggaatactatgcagccataaaaaaagaatgaaatcatgtcttttgctgcaatgtggatggaactggaggccattatcctaagtgaaataactcagaaacagtcaaataccacatgttctcagtaagtgggagctaaacgatgggtacccatggacatacagaatggtatgatagacattggagactcaaaggtgggaggataagaggggcacgggggaggaaaaaacctattgggtacaaagcacactatttgggtgatgggtacactaaaagcctggacttcaccactaatatggtttggctgtgtccccatccaaatctcatcttgaattgtaactcccacaattcccacatgtcctgggagggacccagtgggaggtgattgaatcatgggagtgggtctttcctgtgctgttctcgtgatagtgaatgagtctcatgagatctgatggttttgaaaaggggaatttcccacacagtctctctcttctcttgtttgctgccatgtgagacatgcctgtcatcttctgccatgattgtgaggcctccccagccacatggaactgtgagtccaataaacctctttcttttgtaaattgcccagtctttagtatgtctttatcagcagcatgaaaatggacaatacacctctgcagcccaccctgagagatccagccagcccctccctccacaggctctgtcccagcaccatggtgacttgtcacttctccctccattcctgttcctcaagatcactcctccacacaattgctctgttcatatttgccctgttgccctccaagcttctccagacaagaaagaactttggtcctgcccttgaccaagtcactttctcaccctgtgccctggtcctccccttcccgactcgcccagggctgctgtttggtcaaggtcatggacgtgtgtgaatgccagaagctcccaatcccctctctggctgtggcatcacctgccttgtcctgctgtctccagcatgatctcagcccctgctggagctcagacccatgtgggtaacatggggctcttggctgggtggtagcagtttctcctggaaactggggtcagggagagaaatcagtgacacagagggcctgtttctgaacagatagataggatcagaccttgagagacaacttgataggatagtaatttaggaaatggaaggcagaatttccttgggcctgtcagctctgcatcccagcatgcttctggttgccttgacaactcaacaggttaaacttcttttctgggcatcagtgtctgctcaggcaggaggtgacagaacccctggaggtgtgcagatcttcagcaggcagatgactcagagctcaggctgaccttcaccttgctgggctagctggccttgggttgtccctggctgcctgcatgagcttacgatcatgtccaaccagctgcctctgcctcctatccctcctattcatccatccattcatccatctgtttatccagtaagcagtcattgagcacctgctgtgtgcctggccccatgctagcttctccaggcaggtacatgagttcctggccctctctccaggtcaaacaggaataagctgggaggtcaggaagtccatagaggctttacacctggcatatgtgtgggtccatttagaaagatactctcaacacatgcaatgttgcaagcctgtcacccaacgtctaccagacccttcttatagatgcgtcatttgcaaaaacaaaaacagtctgttttctttcacttaacactgcagggtggacctcttaacctctttccatatcgagacggatttttttcacccatttcagtggctttcagtgttcgttgtaaagatgcaccattagtttatttagccagctcctttctggttcatatttaaactgtttgtagttttatggctattcctgaattatttctgtttcctctgatgtcatctttttctgtttgcttcttttgatgtctcttgtggtggaggctgtcctcagatgcttgatgagccctagttacccattcatagttgagagtggagcaataaacatgtgattgattttgttttgtttttgagacagggtctcactcggtcacccagactggagtacagtggcacgatcacgactcaccacagcctccacttcctaggctcaagcaatcctcctaccccagccttttcagtagctgggactacaggtgtgtgccaccatgcctggctaattttgtttcctttttgtagagacaaggtcttactctgttgcccaggctgatctcgaactcctgggctgaagcgatcctcccgcactggcctctcaaggtgctggaattacagatgtgagccaccacacccagccacctgattttgtaatcggaaggagggggaagagcttttcttcagggtattcgggtgaggagtcaaccctcttggttccaagggagaatcattagttggctagggttgctgtagcaaagtattatggactaagtggcttaaacaacagaaatgtgttttttcacagtcctggaggccaggagtctgagatcaaggcattgggcagcgtcggtttcttctgggacctttctcctgggtttgtagatggccatcttctccctgtgtcctcccatggttttccctctgcccctgtctgcatcagaatttcctctttataaggatacccgttctagggatcactagggtacactctaatgactccatttttgataccggtgggctgggggaggtcctcgaatgccagtggggcctcaaccccagccagtgtccaggctcttgacacccttgcaagaaggaattcagaaaatagtgcaagtatagggatttattacaaagtgaaaagtacatgctctggctgggtgaggtggctcatgcttataatcccagcactttgggaggccaaggcaggcagatcacctgaggttgggagttcgagaccagcctgaccaatatggtgagaccctgtctctaataaaaatacaaaaattagccaggcgtggtggtgcgcgcctgtagtcccagcttctcaggaggctgagacaggagaattgcttgaacccaggaggcagaggttgcagtgagccgagatcacaccactgcactccagcctgggcaacagagcgagactccatctcaaaaaagaaaaaaaaagtacacgctcaagaaaggagtgccggcagactcaagagtcgtgtggtggggtgtggggctgctacctttatgcgtttatttaatccaggggtggaatattcatgaaaattcctgggaaaaaagtggagatttcttagaactgtagtgccacacgtttttacaccaaacatgggtggtctcggaactgtcacagcactggtgggtgagtgagttaggatgttaatgagcatacagcgaggtcctaggagaaaccgaggtcatatctagtgccatgttgggcccagttggtcttagccagcttggtccacaccctgtttttcagggtgtcatatgaaactactgcctggaatttttattctcctgtggccaccttgtattattcctgtctcattttaacttaattacctctgcaaagactctatctgcagtcacattcagaggtactgggggttaggacttcaaggtggatttggaggggaatgcagttcattctataccaaacggacttgcagtctccatcctggcagaagacccccagtgtgtacaggaccggaaggcagccagggctttgatcactctgtctgaagcctcccagttagtcctctgaaagcagtgctccctgctcctcctcccagcttggagtccataggttatttgcagtttcctcagcaggtacatcttccatctcccgccaggggtgcagtaggggatagttgcctggtcactggattgtctttttttctttctttttttttttttttaaacagactcttgctctgttgcccaggctggactacagtggcccaatcatagctcactgctgctttgaactcctggactcaagtgatcctcccatcttggcctcccaaagtgctgggattacaggcgtgagcctctgtgcccaactgccactagatttttaagcccacatttcacccctgccatctgcctgtcctggtgcttccaagtcctgcactttgctgcattctgtggggcaaggcagtcttccccgcactcctctgcaggctcagctagcatgtccccttcaccctgtagaatctgctcccaccctccgtccccttcccatcttccaaaatcatgttgcaatctggcatctgctgctgttcctctctagctctcttcattaccatgggcccctctgtttcattccttcgctgtcattatgctgggatctcaggaggaagatgagctcaacgtacacgttcagtccctgtgtttacccagaatcctcctggcttctccccaagaagaggtcagagccgcagcctgcggaggagggtgttgaggcagctcagccagcatgaggctggccctgctggatccagtggggagaggtcacggtcccctagggctgaggagggagagagagagctgtgggcggggcctgtgcatctgtccttggagtcctgaagtcttgaatctctgttgctactgagagggaaggaggcctccaggtcttgctctgcactacaggggctctggacttgttggagaggtgtctcttcactccagggcttccacccgagacctgggctcccgggactgggtgtgcccagcctcctctcccccacccccctgccagtgatgtcataggtgtgacactgcagccaaagaccaggcgaactcaggcgggtgtctaccacctccaaaataaaacgtgttttctaaactgttgctgaagctgctgaaatgttttgtaaaatgtttacacctcccttgatataaggcaaataccttctgtcagccgggggtgggccgggtgggggagccctgggcggggaggcaggatcaagtggctctggtgtcattggtgacacccatgtgtgttcactcctggtggaatttctcctctcaaggtctctctgtccttgctggggagatggggactgggtccttggacacttctgttttaggaagcctaagctcactgaggaattgttctaggggaagtgtctttgaaggaggtgaggcagacacgaagtccaaagctgaggggatggggagttgctgaaaatgagtgttccctggagagtggcaaccatccctggaggtggcaggcgctgagagacagaactcggggggacacctagggagactggactgcagccccagggctgacttcccagccatctgaccagagggaatggaaggcagagatcccccagacaccccaggctgtctgggtccagggagcttcacagggtcctaaagagggggatggggacctggagcaatttactgtgagttacaaaaaaaaaaaaaaatcacatgcagtcggacctgaaccatgcacagtgagcctggctttacacttgagcatgacacgtgatacccactgtctcctccagcagctctcttgaaggccagggaagccagcccgtccgtgacctctgtgacagagctactgctgcagccacacactcagtgtgtcaggcactagatagaaatggaaaggcttcaggccacacacaaggccgtggggctccagcttcccctctgggagagcttcggcactacatgttctctcctaggcagcactgtggtgtcggcagccccgctgtctgtacacacagctcctccgccaggctggagtcaccctctatgcccagaaactcccacggaagaagggcatgggcagctcctcataccatggggagggacaggagggactgtgtgggcctggtggtgacatgcacacatgacatacacccatacatgtaccacacatacacaccccataccccatacacacgccacacatacaccacacatacgcaggccacacacacatacacactcccacacacacatcacatatacacactgcacacacacaccacacatacatacacaccacacatgcatcacacataccccacatacaccacacatgcaccacacaccccgcacacatgtaccacacacatgcaccacacatatataccacacatacccacactgcacacacatgcaccacacatacacactgcacaccacacacaccacatatgcttgccacacacacacggaatgcatgtagcaaacacactctgcccattggcctctgtccaccatccaaagcttctctgccagccctggcatctgcttacagtggaggggcagcccttttcttcctggggctcccacagtaagctgagcagagcacactgctgagagctggaagttctcccctcaagaccatggggacacaggaggcagggagctgggcaggcagtggtatgcagtgtcaggagcctccagggcaggcccccactcccctatcctccttccactatgcagttccttccccttgcaggggtcagcctagcctgggagctggggccagttcaggggcttccatatcagtgagggccacgtccatcattgctgaaagcagagtggccaccagcactggcccgacgtggacgcagggaggagtggtgcccagacctggcccaagccagggtggctacagtttgatctgaccagagttgccctgtctgtcttcagcttgcacctctggccatcccaggttcagggccactcatctcagctctgtcttatctgtggaaataggaaatcaaagtccatgtaatcacaagggaatcgttcattgggaggcaactggacccaaccagaaagctagtgctctcggggaccctctctgggggcccgcagccatggctggaaaccctattgcagggtcctcggagtcagcattggctccagcagcatgtgtttgccttgacaccagaagatggagccctgagccaactcacattcctccagtccccagtccttctccatcttctgtcctctgagatcgggcatcctccaggacagagcccaggtatcttcctatctctgaacacccacagtcaccttcccacactgcatcaccacagggtgtgcagggcctaacactgctatgctaggttcttaacacatgtctgttgtgtggttggatggatggacagatggatgcatggatggtgagtgggaagatggatggatggatgggtggatggatggatagataggtggatggacagattgatggaaagatggatgggtaggcagatgagtgggcatatggatggatggatggatggatgagtaggcagatagatggatgtgtgggtgggtgggtgggtagatggatggagggatgtatgaatggatagagggatggctgggtggaagaatgtatggagggaagggtggatggatagatgaatggaaggacggatagatggatggaaagttggacagatgggtaggtgagtgggcaaatggaagtatgtgtgggcagataggtgatggagggatagatgtttgtatagagggatggatggatggatggatggacagatggatggatgggtgggtgagtgggtagatggatggatggatggatggacagatggatggacagatggatggatgggtgggtgagtgggcagatggatggatggatggctgtttggatggatggatggatagatggaaagatggacagataggtagtgagtgggcatatggatggatgggtagacagactgatggatgagatggatggatggatggatggatggatggatggatggatggatgaagggatggatggatagatgaatggatggatggacagatagatgggaagatggacagctaggtgggtgggtgggcagatggatggatgggtgggtagacagtctggatgagctgaatgaatgggtggatggaaggtgggagggagggagtgatagatgaatggatggatggacagacggatggaaagatggacagatgggtgggtgcatgggcagatggatggatggatgggtggacagactgatggatggacggacggacagacggatgggtaggtacatgtagtaaaagaaggaaatacatgaggggaggcaaagatttgttggtagactgaaccgtagcccctctggggactaaattctctcaggaaacaggttgaaagctcaacatcatctccagaagctattttcttgcagttcgcacacccagcattcctgtggtcttgtcatcaggctgcctctggccctgtctttcttacctctttgttccttggttgcaccccttccccctcttccctggggctgggcattctcaattggtaacacgaacctggaggggatgtgaatggagatgaggtttctggggagaaacagctgtttcccaccccgagcgtaactcccatcacgggccttgggaagctggaacagcctaacagccacccccagttccccacccacatctctcttttctccctgctttgatgttctccagttagtcctggctcagcctctgcagctgctgatatgaatacactaagtggatcaataacatgtcagtcctttgccaggagcaagggtaagagggggtctgcatctatcaagtgctgagtgacagctaatcatttttcacctggcattcacccttccgaagataagcccggctctgctgggaacaagaagacaacgtcagaggctcccctgctccacttcctgcagagcccagggcaccagcctggctcacatttccactccctatgcgtgatcctgtgttaagtgtggggctcagtgggaatgtgtgcacgccctgggttcatgagcaaatgtgtctgtgggtgggattggatctttgtgtgtgcgtgcatgcctggaggctgaatacctgtgagtgtgtgtgtatctgagtatttgtttgagaatgtgcatgactgcgtatgtgcagatgtctgtgtgcacatccatgcagatctcagtatccatgtgagtgtgtgcatgcacaggcacctaggagcatatgtttgaccatttgtgtgtgcacgcgtgtgtctacacaaaggtgtgtgaggggcctgtgttcatcatcaaggtgttgctgtatatgccaacatctgcatctcccttggttacccttgagtcctctctctaggagacaggattcccagcaggctgtccttccctgagccatttcactgccactccctgctcagctggtgcctagaagagaggagtggtggctggaaccctgtgctcacctaccatcccccttcctgctggagaaagcaggtgcctgtagaaggaaggcagtctgagggtgaaggatcctggattggacaggaacatttcaattgcaagggacagcatcaggtagggctgtatctaggctctgccttggtgtggtcagaacttagcttctccattccttgcctctgcttctcctctcgtgggcttcagtcccagatagccttttgccaaggggtggccctggcatctctgggccgccattgtcaccccattgtgttacctgatcatcctcgagccaattcctttggcaggaggatcccatgccccttctggtgtgggtggtgccacctcatccaaaccacaggggctgagagtggggaggagtagcttcccgtggcgaaggggtgctggtgtggttgtgaagggggaggttaggtggacagaaactgagtgtgggtactttcctcctggggtgaggtcttgcgtctcaggcactaagaggctcagcctgcaggcaccgggcctggctcctcggtgcccttggccccacatgggtgctgtgcagtcacttccatgcagccacaggcagctgctctggcctcaagctttagatgagcctagcctcctgaccaggctccaccggttaccccacacccaggcccagccccctcctgacacaccctgccccacaggcagcttccatgccctgggtgtggggcctgggacctccaccatcctctcactgtgcagaaggggaaggtgctgggcgagcccccacccgggggtcaggtgctgcattaggggcctcaccttccccagtgttccctccacttttagatgaggatacccccggcccccatccgggctcagccaaggagccgtaagcagttctgtaaagtgtggctgcggggctggcagccgggctgctcttcccaggctccatgaataattgaagctccattaaaatgtgcgtctgcagcctggaggacacgccctccctcactgagtgtgggcgcaagcctggacagtattgcctggggctgcatctgcctcggaaggccctggaggggcacaaagaccaggtcagacctgccactcctgggccctgcccctgccccctctccttccctgccttcccttttctccccatcctagcatgtggcaggcatggagacctggccctggagctccccagccaggtggcacagagaggcccactccgggtgggctggggaggtccccagctgctccacctctccttgggcactgacagagcctgctccaagggtggactgtggcccagagtggggggccacacctcggcacaccccagccagggaccaggccgcagctgctcaccagcagatccctggaggatcgacccagcagatgctgggggttggggagggagtgagggcacagagctcccgggagccatcggcagcgcacagctgtcatcaggagaccagcactgctgtgtgtgcaagtgcaagcatatgtatcggggggcgctgttatgagggacatgagtgtgcgtgcacagagtgtgagggtgtctccagagctgcgtggctgcatgtgattgtggggacacaaccgagtctctacgtctgtggctctatgtctgcgcgtcacaaacccttgatcaggctaagaggtccccgtggggaagggcatttctccttggctcctgactgatgcccctccccacacactcaccccccaggggcatcctgtacctgctgttgtgggcccctcctcgactcattctgagagctaagcctcgagtcctaatccaaatctgaaattcctggtaatgaaatctgtgaaaggtgaaaattaaaaacccatggccacaatctcctggtccctgcagtggcccagggtccctgctgagccctgcgtggggcctcgaggcgccagtaccagccctttccccactgccctgccctgagctcagtgagccttcactccctcattagcaagaagggtgcttctcctgccttcaccttcctttgccccaaatgcgacgcaagcgaaagatactctttctcccttggctctcccacccactctggcctccctggtcctcaccactgggactctgggggtctcggcacagaggtgtgatgaaagaagggttaggggctgccagggtgagccaagagaacagagctggaggcttcagcctcggccagccccttatctctagcctcatcttctatattctctcatctggtcgtggtgggtgctttgggaaggatcagggcagagtgacctgggccggagcctggccacagggtctaggtggctggtattttgggctgagctggacttgcccactggagacactgggaatggggccgctcagggctcttgcctggaagtggtccgattccccttggcccagagagaagctttcagggtggggcatgaaggtcattgcccgctgcagcaggggcttcttgcattctccctcttcctcctgtaagaaccggggtctgagttgacccagttctatcccaaggccttcagcaaccgggcagaaggccctcaggccactgacctcttgagatgactgtgctttgtggccaggagtggaaggtgtggtggtagatggggcaggggacagggccagccagtcacataccaggtcctaaaggccttgccatcctgggacctggtattgatgtctttaaaggtgagtatcagctggtcacattggctcatgcctgtaatcccagcactgtgggaagctgaggtgggaggatcactttagctcaggagttcgagaccagcctgggcaatatagcgagaccccgtttctacccataatacaaaaattagcatggtggcgcatgcctgtagtcccagctactcaggggcttgagctcaggagatagaggctgctggaagtcctggttgcaccactgtcctccagcctgggtgacagagcaagaccctgtctcaataataataataataataaaagtgtgagcatcagctgggaggtggggagtgaagggtgtgggcactagaactccctctgggtggctcacaggatggggctggatcggtgtcccaggagcagggaaagccacccaaatgtcccacctctcgacagcagtgctgaactccagacatggcgaggacaggtttagatttgattcttcctcctgaccgccataaagaagggggctccctggcaaggggctaggagacgtgggccaggggctgcaaagaaaggggctgaggggacagtgcatgccggcaacccagccctcagggccatcccgagtgctcagcctcagtgcagctgctcctgctcccccacctcgacccgcacctctgctggcagtgctcccctcccagctcctgcaccttcccctcctctgcttgtatctcagtcccacccacttttccaagcccagcccttccgtgccactttcgctgatgcctgatcctgagccctctcctccccttcccaggccctttctgtgccaaagatgcacttcatccacagtcgcccgggagccacttctggccacgcgtcctgctccccaggtgcgtcctatggtggggatcctctcccaccacctccctttcttcaaatgaggctccctggctgatcctgtgttcctgccaggggaaaaacttggtaccttgggcatccccttctggaaatcttccatatgtcaggcttaggacggacaggcagcgcaggaccacaacttgtgccgacccaggaggctgaaccagcctcccgtggtggctgcagcactgcccaaggagtcgccgtatgtgtgaacccgtgtctgtgtgtgtagagtgtgtgctcccggcccctgaaagcctgtggccacttgcattcatgcacatgagtgtccatgcacatgtgtgtgccacagagtcccagagtgggctgtagtggagccgagagtctgccgtggtcaggccgtgcttggggctggggcctcagcaccggatggggctgtgcatcttgtcgcgcctggctttattaatccattttgtgaatagacttgggagttcatgttgggaatctggccatttgctcccatttcctccaggccccccggaaggaggaacacatgttaaatatttgcggttttgctgcgttaggttttaaagttcagcagtaattaccgtgaccaggtgccaagtggatctgctccctggagaaggctcctgccgtagcgggctggtggctgcattccaggccagcctctgtgtggcgtttgcacaagcctgtgtgccttgctttccggcgcctctctttttcggcctccactgactgctgggcccttcactcggctgggctgtgccttctgtgggtgggtgctctcctctggcccagccccggcccacactcccaaagagcaggctgcgggcagctgaggcaccaatgtgggactttggtaagcagagcctgggggctccagcaagtgccttcgctcccacggcaggttcatggccacacctgtggctgtccacacacatgccatcagagcagacagaactgtatttccagagcacatgttagtttttaaatccctcaccccagccagccccatttcagactactcagttactctttcatgtaaatttcatccaatcatgttttcttgcacaaattcagcatcattcacacatccccgttgagttcacagttctctctaggctctggcctgggtgagtggtgacatctatgtccttgatgtggatatatgcagatgctgcttttggggcggcttctgtagccagggcggtgccctctgcttcctgggtagcagctgtgtctctgctgggcttgacctaggactacatgtcacacccctcaacagtgatgtctttcagggttgctgccagatcaaaggaagagttgggggaacacagtgccagcaatgccaggcaaaggaaaaggggcacattcagccaagcctcaagtaaccatgccctgcaggcctcacacagtcccaagagagaaccccgcatggcctctgatatttgggtgtggttcgatgagcatccctgagacagccacaggcacccagacatgcacctgccctcaacagactcccagcccactgggaagagagccacacatgctcagagtacaggtgcttaggagggggaggtgcaggggagcccaggccagggaagggagagagggaagcagaccccacttcttcgagctccctgggaggcctgtgagcccagggcaggaggagctggggtcatctggggagaagatgcaacacaaggcaagcttgcccagtgagggagactcagtcatgaggacagaggtgagctccatagggtgctgctgcgttagtctgacttctggccctgccctctgtggaccacatctgagtcctgcgggatgggcttggaataagcaagaagagcatctagggcatgttgagaaagactctggcacagggagctgctctgctggcttctagcaggcgtgggcagagaggagatgggcactcccccactgtgcaacaggataccctgcaatttagtaatcccaagacctccaggcctcagtttccggtagaacttagagggaaatccaaaggaagcccacagggaaacagactgtcattaaagtgcagctggggctgcagtctcatctgacggctcaacaactgagggaggatctgtttccaagctcagccaagtggctgctggcaggattgagtccgtctcaggctgttggccagagaactccctcagttccttgccatgtgggcctctccgtagcacagttcatggcataggagctggcttctttcagcgtgagcaagccagagagggaaatgagacagaagtcacagcgcgtgtgtaacttaacctcagaagtgacagcccgtcattgtagctgtggtctatgtgttagacgctagcctccaagtccagcccacctgggaagggattgcaagagcatgttgccaggtggtgaggattgctggcaccatcttggaggctgcctgccgcaggtgaggtatggttgaggtgctttcatagggaaattgtaaccatcataggtccactggccaaagcatacagcaagtcaatacacccaaacctggttgcaacagagaaagagatttaattgtagggtcactgaacaaggaaatgggaaaaaacctcaaatccagctccccaaggagtttgggcctggggtttttaagggttttggagtgggctgaaggatagagattgtcgactggtggaagagtgcagggtgaagtgccaggggcagtgagaggaagaacctgtgttctcaggctgatccccatcttctgtggggtcttcaaactagttttgctggaattcacagtctgaaagaaaaacatcgtatatgatccttaaacaaaagcctatgattttaaggttggagatcctgtctataggagcaatggggatgccaatcaattctcaaacagtcttaggaccctcatgtcagaaatcctacctataggagcactgggggtgtgcatcgtcaagacttagtgccatgtgactttctgctacaaggaagtgggccaaagtgcagcctgattgatgcttaattataactatattcccgtcgagaacccggcgtgcaattcttgccaattccgtggggacagtttcaaaatgacatgctctgccttcccctgtaaaaggatcactggatgctgtgaagaaacagtcagaggaagcaaggttgaagcagggagacctcttgggagaaacacttcactaaaactagtttctctctctgtacaatagatgtaaggttaatcatagaagctgtctcaggcgacattgtaagaattaaatgagataatacagggaccacgctaagctcattctttggtcttttcccctaaggaaagaagtggcacatgccccactgccttttcgagagtctggcttatgctgctgcctactcgagttcattggatgtgttactggaaaggggtcccaatccagaccccaagagagggttattggatctcacgcaagaaagaattcagggcgaattcatcaagtgaaagaaagtgtattagtcagggttttctaaagggacagaactaataagatagatgtatgtatgagggggagtttattaagaagtattgactcccacaatcacaaagtgaaattccacaataggccgtctgcaagctgaggagcaaggaagccagtctgagtcccaaaacttcaaaagtagggaatccaacagcacagccttcagtctatggctgaaggccccagagcccctggcaaacaactggtgtgagtccaggagtccaaaacctgaagaactgggagtccgatgttcgagggcaggaagcatccagcacagagaaagatggaagctggaagactcagccagtcaagttctgcctgctttattctagccgtgcttgcaactgattagatggtgcccacccagattgagggtgtgtctgcctctcccagtccactgactcaaatgttaaagtcctttggcaacaccctcacagacacacccaggaacaatgctttgcatccttcaatccaatcaagttgacactcaatagtaatcatcacagcaagtttattaagaaagtaaaggaatagagaatgactactccataggcggagcagcagcttgggctgctggactaaggatacttattgttactttgtgattatatgctaaacaaggggtggattaattatgagttttccgagaaaggggtgggcaattcccagaacttagggtttctcccctttttagaccataaagggtaaattctaggtgttgccatggcatctgtaaactgtcacggcactggtgggagtgtttcttagcatgctaatgcattataattagcgtataataagcagtgaggacaaccgggggtcactttcatcaccatcttggatttggtgaggtttggccagcttctttaccacagcctgctttatcagcaaggtctttgtgacctgtatcttgttccaacctcctatgtcattctgtgacttagaatgcctaacctcctgggaatgcagcccagtaggtctcagccttattttacccagtatctatacaagatggagtcactctagttcaaacgcctttgacagatgtgttttcgtgtatgcaaacaatgattgagatgaggtttgggttcttcacaaggagcccagagcctgtgcccaaggctgtggccagatcctctggtttacacagagaagatctcaggcagagaaaaggtgtaaagatgcactgttctccttgctggctgccggtgacctcttttccactccaagaagctcatggactcagggaaacaagacagcctgtctcaatggctcagtccacacggacagagattgaggtgcaaggggagggagtcccttaatccacacactgctcacactgggacagctgcgtctccacttcaacccagccagctctgccctgcatgagcttggccatgtgagttcagctgcataccgactgtgctctgttgcaatgctgcctctttcttttgggctctgaaaagccgccccctgaggctcatgattgcccttactttaaagatgaggtcaagcacatttggccgtcactcaggagatcctcttgtctggtccttctaccaagaatcgttgttctgcaccagctgttgcaaggctcacgcctaataaataagcccgcgttctgttttgcccccagctgggctgtactacatactgtcctgacactgaccacctggagttagcaccagacgccacaagtaaaggacagagccctccacaagactgactttacttcagacactggccgcaagtggggtccccaggccacctgcaccgctggccaactggctacagagtcaggtgttcctgtgaatctgtagccagctggccagcagtgtaggtgctggggcccctccagtttgaaaatttgttttaaagatgcagaacacaggcaagtactatacttaaaattgcatttttattagaaaggatacccatagatagaacagggtctgggagggtcccaaacacaattttctcaggctctgggctcctggtcaagagcccaaacctcatctcaatcattatttgttcacatgaagacacatccaatgaaccgaagtgggcagcagggcaacgccagaccctcggaaaggcagtggggcatgtgcatcttagaggaagagacaaagcatgagcttagcttgattcctgtatcatctcatttaattctcacaaggttccctaaggtaggttccatggtacctccttcatggagggcatatcaccctcccagcagatcagtgtgttcaactgggagctcctctgagcctcagtgtctagagtttttattaggattgcattatgaattggggtttgattatgagtaatcaatgattgatgattgattggctgcatgacagaactcaatctccaatcaccctcccctcctctcttcaagtggttggtctttctggtgaccagctcctatactgaagctctctaggagcccaccaggacccatctcattggcataacaagacatgcctatcactgtggaaattccaagggtttttgaagcactgtgtctggaaccaagagacaaagaccagatatattctttttttttttttttttttgagatggagtcttgctctgttgcccaggctggagtgcaatgacatgatcttggctcactgaaacctccacctcctgggttcaagcaattctcctgcctcagcctcccaagtagctaagattacaggcccccacaacaatgcccagctaattttttgtacttttagtagagatggggtttcatcatgttggccaagctggtcttgaagtcctgaactcaggtaatctacccgccttggcctcccaaagtgctgggattacaggcgtgagccacagtgcctggcccagatatattcttgataccacagcccattaccaagtgaatacagccttgtaaagtgcaactttcaaacttactttgggatccattttattatctctttactagttgttcttgcatctgtcagttccattctgatttatgccctcatttcttgtatggcatcctaaaccccctctctgcataaattggggtgtaacagatagattattgcaggcccttccttcagctccgaaagaacatgcaacataagagctggaacttcctacataggagccactgctagcctctaggagccacagccagcctctaggagcactttctcaacggcccacacaccatcataactgcagcctgctgcagagagctctacaaacttccgtcgttgatctgtgatctatgaggcaagcctcctctccctgtgagcagacagcggtgtcagaggtgtgtaaaccagagcaactccatcttgactagggcctgggaaaaaagaggctgagacctactgggctgcattcccagatggttaaggcattctaagtcacaggataagatagaaggttggcacaagatacaggtaataaagaccttgctgataaaacaggttgcagtaaggaagccggctaaaacccaccaaaaccaatggccatgggagtgacctctggtggtcctcactgctacactcccaccagcgccatgacagtttacaaatgccatggcaacgtcaagaagttaccctatatggtctataaaggagaggcatgaataatccacctcttgtttagcatatcatcaagaaataaccataaaaatgggcaatgaagaatggaatagccattcttcattcctttacttcttaataaacttgctttcactttactctatgaactcaccctgaattatttcttgtgcaagatccaagaaccctctctgggggtctggatcgagaccccttccctataacagcaatggggacccacactgtgtgacacagtggtgctgtcccccaggtgggatgaatatgaaggaatggggtggcagctcactgggccagcccccagcccccaggagaacgccctgccatcgttgtcccaactgcaggagctcagggagaggagaggaaggagggagagcactttctcagtgcccaggccaggaggggcatcacgagtggggtctgttgggagtgaggacccaccttcctgatcccagagctgcccactcccactgggcccagcataccaccctgggagcactgacttcccccagggaccttcctgacatggggacagggaaaggcactacagggtgaggtgggggtgaggttctgttgacaaccaagtctcctgcacagcttggtccctgaaacatcccctgaccccagcatcaagctgaacagagggtaaacgggatctctgtgtgagggtcctccatgccacggcttgggcaaggccagaagctgcatcaaatgtcagatagggaagtcccagcccaggcaagaaggaggctttaaaaaaggcttgtgtttgttggcaagcagcagtgccaggcctggcttttgatcaaaacatcctagctgttggcagagacaaaggcaatccctggaaacagcctggctggggagagatggaagagagggcagggttgggtaggggggtcagctctggcccctccccagctggctcacagcttcctaccctcagggcccgaccttgctcctccatggggagggagggggtacttggagaaaaggctttaaatgcctcacaggcagagttagcaatcaggtttcaggaggaaactcacagattgatggggaagccgtcaaatgcacccctggcagcaggagagtgtgaatgggaccgggaacagtgtctgcctccagccaggctgcccccttctcccgactgcccactgcaagggcagtcagagggtcttaggttctgacacacagacacacgcagacacacacacactcttcactctccactgcagccatacaaaatcacattcttggccagtcatggtggctcacacctgtaatcccagcactttgggagcccaaggtgggcagattacttgaggtcagaagttcaagaccagcctgaccaacatggtgaaaccctgtgtccactgaaaatacaaaaattagccgggcgtgctggtgcacacctgtaatcccagctacttgagacgctgaggcaggagaatcatttgaacccggagggtagaggttgcagtgagccgagatcgcgccactgcctgggggacagagcgagactccgtctcaaagaaaaacagaaacaaaaacaaaccaaaatcacattccccaccttttaccagaaggcttgctcacacctgtaaatggagtgtgcctcctctccacctgtttctaattaaagatgtgtattttctaaggcaccacccgccacctggcaatgtccttacaaaagagactgctccctgctgcagggccagggatggcttcagcccaacgatgctaagaatccatggtgacagagacagacatggggccgggatcccaggcccagcctgcgcttggaagcacctcttgcctcactatggtgtcatagaccctcagcctgagaacagtctcaggatgctgttgaactgagacttggactgagaaaggaggccaggggatagactggagggtgcttccgagttgaggtgttgtcctgaaggtcaacagtggaggactagccaggaactgatcacgccagattctataccagcctggagcccacctgggctctcccggatgctgctaatcaggatggagggtaggggtgcttgctgcaggtatttagaaggctccccagctaaccgctcccaggcctgcctccctgtggatgatttgcaccaggctgttttgtcagcctagcactgccttccccggggaatagtgaactcacttttgcagagaagggatctctcagagggcccttccgaggcactctctggtgtctgcccaagctcagacaagatgcatagcctggtgcctgccaggccaacgggggtgactacttatccagcagataagtgtgtgtgagcagctctggggacatggggcaataaggggaggtctcatgtgtcaggggcagccaggaaatgttctgttaagatgtcctttctgttcctgagattttctagcaccagcagacaccgtggccaccacccctctctccctaccccatactgcagacgttgggagtctgcggccatgtaggatgcagcccacagctttgtccccaacattcatgaaggaatgcatggtgtgtcactgccattctgagataggagttcagcaggactagtttcccaggaccctgatgaaaaaacaggatgcagtagagaagctggccaaaacccgccaaaaccaaaggtggtgatggaagcaacctccggttacccttactgctcctaagatgctaattataatacattagcatgctaaaagacatacccaccagcaccatgacagtttacagatgccatggcaactcctggaagttatcctatatggtttaaaaaggggagggaccctcagttccaggaactcccagctcctttccagaaaaactcattaataatctacccgttatttagcatgtagtcaaaaataaccataaaaataatcaaccagcagccctaagggcttctctgcgtatggaatagccactttttattcctttactgtcttaataaacttgttttcactttgctctgtcagctcactcttgaattctttcctgcacaaagccaagaacccacttggccttctgggctgagccccagttttggggtttgccctgtgacaattccatccccaggttcagggccactgagacacgcattcggaactgtccctagcactgggtattggctgccttggtgaccagggctaagcgttcactgtggccataattagagctgggacaaatggctattaggtcctaattgtcagcttttccaaatctggaaaaaagccacgggacagaattcccagaagggaattgtccccacggactactggggacccttctcaaggctgtgggcatctgtttgcggaactgtgtcatggaagccacgtgccatactaagtttgaagtctgagccaggctctcctctaaagcatggctgtcctcctaggtcctcctaggatgggcatcctggccaccccttcctttgagcttcccccagccttctccaatgtgttttctgcccagctaatgccccttgcctaaccctggacttctcactctcctccaagcccattccctctgcatttgatagccacgtacctggcccccaggctgtgactcactgttatctccaagcactagagaattttctcctgtcatcttcagcaacaagtggttgcagttttcattgcagttttcattataataagaccaaaagaaaaaaaaaactgtagctgagaaaatagatgtgtgctttccaccctacactgagaacatcttgacatttaaatccaattacccttttcccattcttgatgaggatatgacatgctgctagaacattctgctagataaatatatcatattctctgactgctcaaaacctcccaggggtggatttgggggttctgtgacccccgttcactatcggcctctgtgagaggacagggtcgtggactggctgagctaaaaggccctgaaaatgtttgcctggaaaaattttgcagcatttgacctctgcctttcactgagtcattaattgggagaatggaacaattgcagaaacagggggacttttgtcctttgtatcagatctgtacacattcaaaccccccatccctgggctttcagcaaaacaccacaaaccagtaggccctgggcagagaggtattaattaagcacattcccatattacttcaaaatgtctatcctcccagaagcaaagagtcattgactctaaatgaagcagaaagccagaaaggagcccttacagctattattctgctgtaaatattagttctcttttgacatctggagagagagagtgcaagttttttctttttttcttcttttgagatggagtcttgctctgtcacccaggctggagtgcagtggtacgacctcggctcactgcaacctccgcctccagggttcaagcaattctcctgcctcagcctcctgagtagctgggattacaggcacacaccagcatgcccggctaatttttgtacttttagtagagatgaggtttcaccatgttggccaggctggtcttgaacttctgaccgtgggtgatccacccctctcggcctcccaaagtgctgggattacaggcatgagccaccgtgcccggccggagtccaagatttttagcaagtgtgcatactgttctgtggctagagagggagatggtgggtggggaggatattgccaggattaaagccgggaggaccctgcatcctttgccttccagtagggttccccagtatgggccgcatccacagggatcaggcaaaactcccccgccctccttctgaaacccacttaccatgtaaagttacacggttttaacttgactctgcatccatttccacctgcagagaaagaggaaaatgaaagttctgggagatttagaatctcattgtaactgttaatttcagccaggatggaatccctttcctatccttgtcccagccatgactattatcatcctccgttgacctctctcccccctcctccacaagatgaagtgttaacaagcagaggaaaattagctccactcccccagcacaacatcccctgccctgcagaagtcgtggaagccataagccatccctccctgccttcctcccccttcatcagggctgagtggccagttgtcttcctcccctgaggatttcatcatcctcagatatcccagagagtgtttgcagttgttcatcctaaattacactgttgttttagcctgttgtgtgctcagagctgattaataaacagaaattaagtcacttatttactttttgcttcaaatcacagtgtgcgactcgagtggttgatatctcactgatatttgtgaatgcgtggatgagtgactggatctgcttgtgtgttgaatggaattcaaggttccttccatcagtcccaaaacatcattcctaagagctcacatgtgcctgtctgtttttttacaaaaacaccttttgtctcttctaatagtccctgaatgcttaggtaagagtggagaatgagagctctcttctctgacatccaggctctgggcatctctcaaaaagagatggtcaaagaatctgatgaggtctgctgaaaaggaagggtgccatagagaaccagaccagcccccatcctggtgagcggtgcctcctcacacaaaaagctaatggtttgggttggtgtggtcagaggagagcagctctcagagacagaggtgaggatggaggccctttcattttcctggtgagtctttccatactactttttaaaagaaagtcggtactttaaaatattttgtaagtcaatttgtccaggatgcctgcaagttttcctggaatttgatgcaaatacgaggctatgctaaagccattcagcaagctgtaggagccccaagtggagaaactcaaactagttcacaggagcaaacatcatgcagctccctccaaggctacatcactcgtgggttgtggtgtttctttgtggaagtccccaagctcttagggtgagagggctcttcagtgacgcccagggacctttctcaaggctgtgggcatcggtttgcagaaccgtgtcatggaaaccacatgccatactaagtttgaagtctgagcaactgctgggctgagaagatcttcaggtttccctgtggccgtgcagcctgtgtggcatctgccatgcaaggagggatctgggacaaagacagcttgctggactgggtcacttcagggaattcatggcaatagctttcccagggaaaggagaatcaccctgaaacagacccagactggcaatgtaagtcggactgtcataccactgtgttgaaactgcagcacgaagtttctctgcctcttctttctctgtttcagctctctgtttcaggaggttcagcaagccctaaaggccattacctggccacctacctatcttccccactagagagtaaacctctctagagattagttatttatctttccatcagcccccagaactggcatcatatgggacagtgcacacacaagtcttggtttctgaacttatcggcatcttgtgggggctgtccatggtgttgaggccccactgtagtcatttcagttaatcatataaatggccagaacctcacgggttatccatggtgttgacagatttcacaccttacattccccgggtcctcctatcccagagaacagaacctggagctaaacccttagagcggggtatcattgggagctgtccgtggttctgaaaacagcactccctctccttccagttgcctgagctgctgcggcagggtcagaactgtttgtggtgtcagcctcgttttgatcagctaattgccaattttctgcttcttggtccagcttagaccccagccagaatctggcctgctgctgctgtcaatcatgctctgaggtacctacatggtcctgcttgtattgactctgcctgtaacgtcagtcctgccaggccctgaccaaggactggcctctgactgcaaggctgcgttttattccagcctgttgtatgtcaggttccctggaaagcagactgaggcagcgatttgcactcaggaagcttgttgggtttatattatgacaaagaagagttaaaataactttggagaaaaatataagtgtctgctgtccactgcaagtcaacatgaactgtttctgatagtcctttttgacagggatggaaaacaacctatttttcaaaccagtggtcacacaccacatacctgaggccacaaacatcttccctagcaaatataccatcatcccaccaacatggtggttgcaactggggctatatcttgatagagtttatgggattctggtgggacttgcgtgtcttttgtaggactggactggtgaaattccatggtgatttgatggtgatgactactcctgcatccttgaggtcttttatcaagcagagtcctgtggatttttttttttttaaattgtgctaatctctatgagacccccaggaagtaatattgcctttgatttaatgtctagattcatgggagagggtcactgtcaaaggctggcattccctatggtgacggtccttatcccacagatcaaggacatgggggttttgccagctgtcacatctatctattcggattatacatctgggaactggggagaaatgctcgccagatgggagtctgtgaacccaacatgagccaggcttgggtcatttattacctggtaccctatgtgccctcactgtatcagggtgcaatggcaacacttccagttctcaggggctaagaccccagatgtaaatgtcaaaaaaaaatctagaaatgtctgagtgttctccttccccaagtgtacacctgtttaaccaaatggctgtgggtcctgttggggaaagactgagaaaacattcccatgtgtatttgccatgatgccatggggttcttcttggggatgtggtctctcctttggtcactgagttctggatctgaaaactgggtgtattagtttgcattgtgtttctataaaggaatacctgagactgggtaatttaaaagaaacgaggcttatttggctcatcattctgcaggctgtacaagcgtggcaccaacatctgctcagcctcaggaagcttttactcatggcagaaggcgaaggggtagcaggcatgtcacatagcgagagagggaacaagagacatgccagactcttttaaacaaccagttttcatgtgagttgacagagcaagaactcgctcattaccatggggagggcaacaagccattcatgatggctgcacccccatgactgaaacaccccaccagactccacctctacattggggatttcatttcaacatgagatttggaggagacaaaacatccaaaccataacagtgggcaaagaactgtgccattttcttgggacagctgatcacccctccttgatttgtttttgttgtatatatcggcttgtcgaccacctgactttcttgttttttgggatgccatgttttggtgaccacctccatagctctctgcagatcagcccctcttggctgctacaccaacattgctactcagtaggacaagtgtgcacactttggttatgatggctaagtaccaccgtgtggtttctgttattttacaatcctattgtcccccatcagtctcggggtgtccaggtctgtagtggcactgcctacattcagccctgtcctacagaggagaggcactgctgggcttctcactcatgctggtgcttcctgaactctctgggctgcagaggcattctgccctctgcaatataggctggtggccctctgttcattgaagacactacagagatctctgtcctacaacacaacatatgccccctgatcctccttcccctctcaccagtgtgttctatattgctttagaaaggggtgggggtatcttctaggcagtagtggattttccagctttccctagcatgtccactgtagcataaccacctttgggagccttttgatctcttcctgcactatctaccacagcaattctttttttttttttttttttttttgagacggagtctcgctgttacccaggttggagtgcagtggcgcgatctcggctcactgcaggctccgccccccgggggttcatgccattctcctgcctcagcctcccgagtagctgggactacaggcgcccaccacctcgcccggctaattttttctatttttagtagagacgggatttcaccgtgttagccaggatggtctcgatctcctgacctcgtgatctgcccacctcggcctcccaaagtgctgggattacaggcgtgagccactgcgcccggcctaccacagcaattctatcatccctgcttcattgagtgtgggcattgctttctgcacgtatctgagagccatctagcagcatgtctgcatcgtctcctggggtcgttgctgcactgtcagatcctctaacccaagagaatcctcccttatcaattactgctctatccaactttgtgttctgcttttttctttttttctttttttttttttgagatggagtctcactctgtcgaccaggctggagtgcagtggtgcagtctcggttcactgcaacctctgcctcccaagctcaagtgactctcctgcctcagcctcccaagtagctgggattacaggcacctgccaccacgcctggctgatttttgtattttagtagagacagggtttcaccatgttgaccaggctggtctcgaactcctgacctccggtgatccacctgccttggcctcccaaagtgctgggattacaggcatgagcccccgtgcccagcctctctgatctcttgtctaccccgcacaccctgccccagcgtcaaggtctatgtgtactctcctggttcctgccaatacctgatttctggatccttcttttcttttggggtatagttcctttcttcccttagcaaatctagcacttccccagtggggacatgctgtgatttaaccgtagttattggtctagtggagaaaaggtgggggcagattctgaggaaggcatgtgttatgttgcaggacagagacctctgcggtgtcttcaattaatggaagaccaccagcctgtattgcagagggtggcgtgcttctgcagcccagaagattagaggaaatctgggaattcaagactttcacaggcatcgacctacagtccccaacgcatttctcagggtcctgttccttctcagccaggtgcctgccattgccaagagtcacccttcagaagctggatactcttcctttctccccttcatttttttttctttaagagacagttttgttctgtcagccaggttgtagtgcagtgctgcaatcatagctcactgcagcctcgaatgaactcttcggctcaagcaatccttccacctcagcctcctgggtagctgcaaccacaggtgtgcaccacaacccccacctaattaattaattgatttattatttatttatttattttgagacggagtcttgctctgtcgcccaggctagagtacagtggcatgatctcagcccactgcaacctccacctcccgggttcaagcaattctcctgcctcagcctcccgagtagctgggattacaggtgcctgccaccacactcggctaatttttgtatttttagtagatatggggtttcaccgtgttggccagggtggtctcgaactcctgaccttgtgatccacccacctcagcctcccaaagtgctgggattacaggcatgagccaccatgcccagcctaatttatttttattttgtgtagagatgggctctggctatgttgcccaggctgatcttgagctccagccttaaagaccttcctgccctggactcccaaagtgttgggattacaggtgtgagccacagtgcctggcctctgctactcttaagtcttgagacctgtcctcttgctggaggtaagagtctctatataggctgccacagagttaattgccagccaatgccattgttcccaaattactatttgccccatatttcttagcctccagatacatttttttacatgccagggcattttcttccactggtacgccatcctagtttatcatcaataaacattttaacggaggcattactgcctctggccttgtgccacagctgcctgtgctccacctaccaccaatgctggggacctccttgctggctggttggcaggtgattcaaccctaacatttcatcttagcatctgctctctctgccccactggcactgactgtcgggttcctgggaaagagactctgaagaagtgcaggaggtgaattgcacggggctgggagggaggtgccctctgatcaacacctgtaagggaacgaaggaagcaggagtgagggcaccgggtggggatttagtctgccagtcccacagggagctctggagctgggatattcccacagaattgacctgaattgatgcaagggggctgtgcctttataccacacatcaactagtgtctggatgcaggcagccccttgggtgaggggactttgtccagctgagaccactctctggagagagacccagccaagctgcagggctgtgatttcacaatctcacctgaccccagcctccctgcacccttcacctctggctcccagcccctgctgtcctggctcctccattccacatgggacaaggagtgactaaggtttacttgactggggcggagacagtttttccaaattcctttgcttattcaaggatcattgaaaattaattgtagctggtgttattgaactcacagcagtctttagttttataaaagccttttccttccaagtgttgccatttggtgttactgagatacaagcaagatgtctgcaaaactaaaatagcatttttttaaaaaacatggcactttagagttctaaaatatgttcacatcgttttttatcaatttgattgaggtgtaatttataaacaagaaaacacatgcattgtttatcaaatgtattccatcaccccaattggagacgtgaaacatttcccccaccccagaacattccctcgtgttcctgctcactcactccccgcaccgcccccggcaaccactgatcttattccatctctagagattcattttgcctgttctagaattttacataagtgagatcctacagtgtgtgttcctttatgcctggctgattttgcacagcaaaatgtttgtgaaattcatccatgatcgtcatgtatatgagtagttggtgtttttcttacaggcaagcagtattccgtagaatggatgtaccatgttcatttatcagtttgcctgttgatgggcatgttctttgagtttcctgacacagcatacctggacacaggccatgttgtctttagtgacattcaggcaggaggagtgacctagtcacagccatgcggccaggagttagtgggaggtgagttctgcgaagcagggggcctgacttcactccattccagcgtcacctaacaaaagaccctagaaaacaaggatctggccagataactggtacattttgttctttttttttttcaaggcatttatttttccataagatgctctggtcattttctttggatgctacttgagttagcatcctgccaagcaatatgaattctcctttttaaatcagggcgatggtaattgaggggcagacctgcagagcaatcggtttgggcacatgcatgtcaaacggactatatatcatgacatcagacattttgagaaaattgctgttcctccctgaatgtcaagtcataaataatttcaggttggggagagctctggtaagcatatgtttgactccagggaatggcctgtaaatatggtgggccagagaataaagaacgagggggcagatttgtggggtcacttctggtctggaccttgctataacttgttgtagagaagccataggtgccccactcagacacacttcagcgggcaggtgcgcccttcccctgctgcagttagtggggacagctaattgctcacagctgcacccgtccttagagatctgacctcagctgataggatactcctcttctggaaggcgacaccttccccctggagttggcctgcaacccattcacatgctggtaaaccccttctccagggaggaagagaatagagccctgatttgtagcacttgccaatatctatggtgtaaatactcccactgcatccagctctaagctaccatgtaaaaataaacaatacgttgcttaggggatatagacatatgccacacacacatacacacacacacacatacacactactaagaagagaaaggaatgataaacacagaattctgtgaagtgattaccccggcaggagcaggagagggctgtccaagaggggcaaagagggagcgtcaatgatattgatagaattctgtttctgaaactgggtggtgaatacctggctgtttgttttcttcgtctttatagtgttatatattttcttttgcatgaatgaaatgtttcatgacaaaaaacaagtctaaggaaggcttttaagctttgagatttttttttaactgacacacaaggggggttcctagctctttgtggaggccgaggaggtggctcagcgggtctcctggctcccctgcacttgcccgctgggtatgatgacaaagtccacacttctaatgagttctggtggagaaggaacatggcctggggaaggagattttcctttccctcaggacaggcaggaagaggaggtggatgaggggctgtccacagagctgtcccgtccagtgctccctcctgccaaggacccaggggaatgccgcctgccactcacccaaagccaggctgttcgcactgtctgatccacggcatctagggccttaatcaatagtcatgtagctatgccccaggcactcgccaggcccaggcactcagcttccactggatggcggtgagctcagggaccctccacatcccccattatcatctccactctccaagggcagaagtgcaggacctaatgggtccgaacctgaccaagtccccacacctggtgagaagtggagacacagcttctgccaggacagatggggcctgcagcccatgctctggccatcacacagggctacccgctcgttggtgccagcgccgctgggcaggctcatggccgtgtcgccccaggttcctttcccctgagccttcctggcctgaggttccacttctgctcacagcttctgctggggtcccagctggggagggggagatgaaaggtctggcccagatctgggacccagggtctcttactgtctcaacatggtgttgggggtggctcctgcaggttccttcagcaagcccacaggcccggctgctcaccttgtcctctattgcaggagacgcacacagccttggacagtaagccctgatttcccattatacagatagtgaaactgaggctgcaggcaggtaaattgctgccgctcctgggcccttaggaggctctcacagctcagatcctcagtgtctaggccactttgcttcatccagaagccagtgcagtgaggaaggagaggccacaccatggataagtgtgtgacaggccttggaggagaaggcaggtgaaggcatcaggaccgaaggctcactcggaggagagcctcaaggagtgaggctgggaagctcccacccaacaggcgcacacccctgagggcatcagaggaattcaggacgccatgtgagatgaggcctgggtggtgccagagggacagcagcaaggggggcccccagcaggagaggccctggtgggcagaaggggtgtgcatgccccagggatggcagcaaaagcagctatgtccggggctcccccacctcaccacaggtcccgccttgcagccatgaacaaagctctgagggaaagcagcaggtggctaggagagcacacccggagccagggacaactgagtttgatccctgagttcaatccctggctcagccactggccagctgtgtgaccttagtggctaaatatgtgtatatcacagcttcatcagtgtcaagctggggcaaaataataacctttctcccaccagccacccaccatcctcctaccatcccccctccatcctcctatcatcccccctccatcctccccatcatccccccatctccccaccatccccccaccaaccaaccaccaatctcatggccttctgtaggggccgatgctatgagctcttcacaacacatgggtggctggaatcagtgggtgctcaatgaaccccatcacagatgaagacagcggtgatgaggcacagggcagggtcaggctctgcctctaagtccctgggtggtcactagggccagtaacttgggcaggtcctgcagccctcagtcttactgctactcacccacctccctcccaggcactgtgggtgctagaggccagtgggtgcacctccctgaggccccaggctgctgagccaggagacccagggtcaggctccaaagggaggaaggacatgtgcccttagctatgggtgggttgtatgtcacgtgctgtgcgctgtccagctggcgcaccaagcacccagctcatgaaagggtccgggtcgtggccctcatcgtgcagcagccattggcaggtgcgttgtgccttgcttcctgcctttctcctgtccacaggctgcactctctgagtcctccctgaggcctggcgccccagctaggtgtggtccaggaagctggcatggctgggagaccgaaacgccctgagacgggccagaggctcaggcctggaaggaccctgagaaggcagggcccctcgccaagggggtgcaacaaggtggtctggaacccaagagaggagggtgacctaaggggggtggtgacagcatgaggtcacaggggtcatcaagtgctagttaagcagggtcagcagggttgggaggatgcacttttgggcagggtcctattacttgagtagggtcctggctgagttcaactgctccagcctctcctaactagccgtctgctataggggctgtggtcaccagcataggcacacgctgggacagacctcagggtttcctgctcagtcccctctggggctacccccaggaccccagggcctggatctgagagccatccatccgggaggagaagccaccagagttggcacatccctgtgtcctgggccactctgcctctgcatcccacaccccgcccctgtatcccccacccctaagcctcgggataagccatccctgaaggctgctggaggcgagagccactccccagtgtccaccagccgctcagtttcccatcagggtccagaagtattgattctcttaattggttgcccatagggaaccaaagaataaaaccaggcaaagcaaaatagagcattctttttcgttttccagaagtgtgatcagcaaagcctcacggttctcttacaaggccccaggcaccagccgcccacccccaacggagggaagaggcagtggtgggccctgggccaagcctcctggctggggcatctgataccctttcagaccgagcctctccaggctcggtccaggctcaccactggtacccctcagcagcaggcagatgcacccccacccccacccagccctgcaaccctcccagccaagccagggagggcctgaggatttcattatgagctcagattatcatcaaggacaagggggagtgatggggaagttacaagctctccttttaataatgaatcccatttcctcttggagttggttttcttgcaacagatgctgttgcagaaaatggaacaaaatggaaaagataaaaaggcaagtcattaacgtggccaaaaagccttcccagcagatgttggggatggcggggcagggtgcccacagcctgcccaccgcaccctcgcttggcccggctgaccagctgccacggcagggacccatatgttctcaggattcacggcttggctcggtgttgggaagcacagagccaccctcccgctgttcaataactgatgaccatttttctccaattaagctgaaattgaaggatcctcagacgtagacatccaagggaaataattagtgcttaaaatgttaattgtgctcagatatgcctgtgctgtggcggcagcttgccagtgagcaggcataggtaagtcaccttctgccctcaagcagcccccatcaggcaggctggtctccccagggacccagtgtgggcagcccaaggccaagaccctggcagcttttctgatggtggacactggcttaatgatagtgagacgttctgtgaaccccccagcctcctgcctgaccggcccaccgtccccgggcactggcaggcagcatcagagagtggttacagcaaggacatggaatcagacagctcgggcctggacccaccactctgccagcctacctgggcagcagtgtggatgagggtgacccacttaacctctttgagactcagtgagtgccctcatgccaaacagggatagtaaaacctatcctgctgaagcccccacgggagcgggatcatttctctgtccagcctttaacacccctcagcatggggcctgcggcaccagctcccaaatgaacaatgacagaatgagtgttttccctccaacggcgccaggaggggtcagggatcggggtagcagcgtggtgtttcccccttctgggcagcggaggggccctgcttggccagccattcagaccccaccaaccctgcacctaggattggatgagatttcctgcccaggggttggagtgagatttgctgccacagctgcctgagccccaggacgaaggggaggctccgcctagcgggtattggacgccccagctgcctgagcccgggagccctgggatgaagtaggggctgcccatgccaaccgcagttcccccaacctgcccgccgcctagggggaagcaccaccccctgcccggggagaggaattcactcccacagggattctcctgctcattactcgacccacgcgtgagccaggcttcgctctctgccaagatgacacgtctaagaggcttagtcttctttatgctgtggatcctgaggaaatccacttagatattctgtgttccctgatccgccacataagattcctttatctcttgttgtcatgggaagtatatattaactgattaatattaatgtgttggccgattaatattcatatctgaaccgattcgtatttcacaggcaacgatactgaggagcatggcagagcccagacagctgtcggttttaggcagttccccggggagtcgcagaagtcgcatctgacccttcccgccgccccacgttatggacaccctctcattagcagtgtctgtcagggctggcatgcaagtgtgtttggactctgattgtggcaattaaaatccttgccatccaagacagcatattttatcgtttaaatagcattttacattcttctaacatatttccccagtaacattgttaaattaggtgataaaaggttatttttgcttctgaagttgaaatacgttaccattattccttatctgcctggaattagaaaggtttcagaattagtgttccaatggtttcattatcaaaatttgccagactttataaaacaaacaacaatttttttgcccttgtgttcaacaaagatgggcaaaggctttgtcttctgacattggagattgctttcagcgttcggtggagaaagaagccacagccttccctgcagccaggggggtgcactgggggctgggggaaggctcgcttgcatttgaattggagccaccactgtcacctgtgccactgcctgggcatcagaggccacacaggtcagggaggtcactcttgcccgtgggaacggcacagccagagcctgcaccttcaccagggggagcggccaggagcctgcctatgtagcctgcatgtagcttctccatctctgctcctgtctccctccagcacccctttccagccccagccctttctaggccccatctccaatcttttcttcaggacttctaacaccaccaactgtcctccatctacctattatcctcccacccaccatctccccaccaacttcccaccttccccctaccaaccacccaccttcctcccaccacccaccctccatcctcccaccacccacccaccatcctcccaccacccacccaccatcctcctaccatcccccctccatcctccaccatcccccatctcctcaccatccacctgccatctcctaaccatcccccaccaacctcacaccatcccccctccatctcccaccatcccccaccaacctcccaccatctcccaccatccccccaccacccaccatcccccctccatcccccaccaaccacccaccatccccccaccacccaccatcctcctaccaaccctctccatcccccaccatcccccgtctcctcaccatccacctgccatcccccaccaaccacccaccatccccacaccacccacacaccatcctcctaccatcccaacaccacctacccaccatcccccaccaaccacccacccaccatccccccaccacccaccatcctcctaccactacccctccatcccccaccatcccccatcccctcaccatcccccaccaacctcccaccatccccacaccaaccacccaccatcctcctaccatcccccctccatccccccaccatcccccatctcctcaccatcccccctccatccccccaccatcccccaacaacctcccaccatccccacaccatctcccaccatccatatgccatccccacaccatctccccactaccctctgtgtaccatcctacctgacatcagtgtgccccccgtgtgcatctccccatcatcagtgcatcacatctgacaaggaagacacccttgtgtggtacaaaccccctcctcactcacacttggcagtcaagtgtgctatgagctgggcctggggcctcatacctgctaatggactgctttatccccgcacctggcatccccaagtcacccgggtccatgacctcttatgagcaaaccgtccttgctacagcactctaggctgcggggctcttccgagaacacatttctctctagaagaagcacaccaggcaggatgagggactgttctgctgggatcaggggaccttgccgtgcatcttaaccctatgcctgctctcatcccctttccctctgtttttggtttgatccaaggacaggatcgactttaccaaagaggaggctcatcctctcccagacgtccaaccaggatggagctttagcttgactggtgggaacagtccagggtgctgtgtggcagcccctcaagtgtttgcccacctgcatgcccgctccagcctctgccacgtctcacagggacaactgtcccagctgtcagaggcaggggtgacagcctctcaaatagactagctaagaacagagctgggagagcaaggctaccagtttcctcctgagcccaggctggggtccatgcaaatctgttgtggatgtgaaccttgaagttgattgcagatgatgtgaacctctgagatcctgctctgcagggccaggtcttgatggaaaaggatccctttctgctgagcacctgagtgagagatgccggctcaggggcacctgtctgcagcctgatcctccttcttccgagcagctcagccctgcagagccatcctagcctggcccatccttgtgtctctcacttgcggatgcagcagagctaaaggctggaaatgacattctcaggatgcccaccacccatgcaccccccaggggctcaggatggtgccttcctgtggacttccggatttccaaaatccctgctgtctgcaaccacagattttcacagaagcctctggcactggaaaccttctgatgcccctgtcaaagctcccaccgcctgacacacctgtgctgtgctcaccccgccccatactccctgttacacagcagcccttcattctgtaatcaactcccagacaaacagaaaacatgctagcagccgtcgtaagcatcccccatgtgatttattgccatcatcacaatattttgtttggagctgtaatcctccggacataaatcaagtcattagaaggaatgacgtttaatcctggggaagatgctgtggtgggctgagcagcagtgaatcacctctcaccctgctagtgaatcattcattctagaaagaacggccctccacacacctacctggcccgctcctcatccctgccacgcgcaggcgtgaaagacagaaggcacaagccaggcttgtttgtttcccggaatagcacatttcacaaccgcaaagaggtgcccaaaacacatgcccggtgctccagactggagccttaattcctccagaaatgcacgcagcctggaggggctgcctctgtgtccgtggtgggctctcttcgtcccgagagcagctgcgctggttggacttcaaaggaagcaggaaaacagctcagatatcttctttagctctcctttcacggtgaccccagacgccctaccaacagccattacatgggagcacattccgtttgcaaagctggcgggtctaattgcagggcctttggtggagatgtgcaggcagaggctaagcaaagagtttgaggccttgaaaggggaattcagggacctcgggcactgtcttccaggagcccagtaagctcctccacccccacccaggcaaacaccggcttccagttccctgcaaatggcacctctcttggagcaaggagacacccccaaagtgctggagagcgaagaacgggaagggggttgggtcttggctgacggattgccttagaagacttcatgttattgaataacgtgaatactgtgatgatggccaattccaggtgcgcatgaagatcgtgaaaataacagctatttccagtgtttacatctacttaatattctcgtgctcagagctaacgaggctggcgttaggcggtgacgtgggcctgtttgaaggatgctggaagtcgcgggcctaggttgcatggtgtgtgtctgggctgcctcccaaaccgaggtatgtggcccagatctggctaatggacagtttcacccaagctctgtcctgtttccagctgacagctgctacctgcaggtgctgctcgagtctgtctctggttcaccataagccaaggttgggtcttctcccccaagggctcctccattccctgagacctccctgtctgggggtcctggcagcatgctatgggaggagtcctccagacatttccctcaccctcacccctcatacccctgactcaccaaaccctctagccctctggctttgttgttctgcaaaatccaacatttccttttcctacccccgcccaacctgcctaagttcagatgtccccactcctcacctccatcataaggtaagaacctgaatttgttttcccacttccttttgggcctcactcttctccaagttccccagtcacctccagaatgacttctgaacatgcaaccctcaggagtctctccgccctccccactttccccaaccctgcagtcagcaccccagggctctggaggctgtacaggtatgagatgcaaagggcctgtggtttaggtgtgagtgtggtatgggggtgtggaggcagccccgtctggcatggctgtgagggggcagtggaagacaggctgtctgtgctcccatgatggtctggggcccccctggtcagcccacatggccctgtgggggctcctgctgctacagggtgctgggctgggcggaggaagagctggccattcaggatgggcgcagtggctcatgcctgtaatcccagcactttgggaggcccaggcaggtggattgcttgagcccaggagttcaagaccagcctgggcaacatagtaaaaccccgtctttactgaaaacacaaaatttagccaggtgtggtggcgcacgcctgctactctggaggctgaggcatgagaatcgcttgaaccaggaggtggaggttgcagtgagccaaaaccatgccactgcactccagcctgggcaacagagtgagacgcggtctcaaaaaaagaagaaagaaagaaagaaagaaagaaagaaagaaagaaagaaagaaagaaagaaagaaagaaagaaagaaagaaagaaagaaagaaagaaagaaagaaagaaagaaagaaagaaagaaagaaagaaagaaagaaagagaaagaaagaaagaaagaaagaaagaaagaaagaaagaaagaaagaaagaaagaaagaaagaaagaaagaaagaaagaaagagccggccattcagaagggagcagaaaggggctcttggacaggtatccaggggaggtgatgtccccacagccagccactgacaagcccaagattggcatccatactcaggtttggtgtctttttttaagagatgggatctcactatgttgcccagactcaacatgggagctcaaactcctgggctcaagcaatcctcctgccccagcctcccgagtagctgggattccatgtgtgcaccaccacgccagtattatgctcaagtttgacccctcaaagaagctggtgtaatcctcaggccagagccttccagagcttctcttgccccagcccttggctggacctgactccagcttcaaggccctgccctgggagattcaccccagctctgaaatgtagactgcagctatccagaccctcggcagggaagagccggactgacggccagagcccctgagtgctccgggcagtctctggccttgtccctgcaacctgtgaattgccagagtctctgttctgttctggtggggtggggtgggggggcacacaggatgacccctcagctgcagctgcccctcggtgttccctgagatgccagagagaagacactggagatgttggtgtaggggtgggggtgggcctggaactgtagctgcccattcactgtgcttgagtcagggccgtcacccagactccgggacccctgtgggtacagtcagtgaccatcagtgctcagccgtctgggagctcttccaaggatcagagcacccatccctgagcccctaggcagccctttgcagtctggagccccactctccccagggtgtctgcagagccccacccaggccagagcggcctgcagtgggggtcacttcaaagaagcatcacttaagacagattcacttttgtggctctttagggtatcacagcaacagctgtgacaggcttgacagctccaggccagctcggtaattgacgtggcagccagaacaatgcatcccaaggccggctggagctggaccgatcattttcttgcagctgggccacagtggtaatgaggctgccgtcctggctgcctgactccattccagggtgaagaaggacatgctgcccacgtctgcccctggagggcctgtctcagggctgggccagtgggtagggagcacttttcctgtaaacaggcatgtgtcagcacattcttgcactgctataaataaatacctgagactgggcagtttataaagaaaagaggtttcattggctcacggctctgcaggctggacaggaagtgtggccccagcatccacttggtttcttggcgggggggggcggtgctcaaagagcttttactcatggcagcgggcaagcgggagtgtgcgtgtcacctggtgaaagcaggaacaaagggtgagacttgggggcaggcggtgccacacttcacaacaaccagatctcatgagaattcattcactattacagggatggcaccaagccatgaaggatccccccatgagccaaacaccccccaccaggacccacccccaacactggggatcacacttcaacatgagatttgggcggggacgaatgtccaaactacatcaagacagcccctttatggggccaccccagcctcgggctccagcctgactcacttgcttctatttgctggtaaccccacaatgggaattcaccattatttagaccaaatgaggtgccttcctgcagagctggctgcagagtggtcaccacgtgccatgtcagccagacaagaggaggcgttgacatccgtcccatttaacccaccaggcatggtgctgtgaggtcacggctgctgagagcctggggtgggatcccggtgggcccagaaaatggcagcctccaggcccaggcccactgcctctacccctctttccctgagaagtgctggtatcatgcccccactggcccagaagagccacaggtggctgaatgagctcccacaggcacgtctgccccccgcacctctgaccagccacccctgatcccctaattccctctcctccaactgccctctggatgtctgcacttgggagacctgtagtcaggtctcctcaaagtccacagggatctgtcctcctgcgcagggaatagcatcagcattcaccactgctaaagtcagaagccagcgtctccctctgcagtcagccagtcccaggtcctgctgatgtagtggcgagttcaggccaacttgtcctggcccccaagggcccagccccacatgacatcagtagtttgaaatctgccatgatgggatttcagaccacggaaatcagcaaacactgcaaaccaggctgctccccgctcccaccccatcacccagaaagtcaggtgttcaacatttcccagcacacctccatctcccgaaatgttcttcaactctccctccactgtttcatcatcccctgggtccaggcctcaagagtctcctgcctggatagtgacagcaatcccctgaccaacctttctgctgtatctttgactccatctcagaatggtccttaaattcaaaataactccacaccctaaagctctttgagactctcctgggccttaggaggtaaggtctagtgtctttgcatggctataaagcctctttcttgccggccagccatcatggttgcccttccttccttccctccttccttccctcccttcctcccttcttccttcctttctcttttcttttcttttgagacaggatctcactctgtcacccaggctggagtgcagtggtgcaatcatagctcactgcagcctctaacgcttggactcaactgatcctcccaccttagccttctgagcagctgggactacaggtgcccatcactgtgcccaggctaattttttcatttttttttagagatggggtctcactatgttgtccaggctggtcttaaacttctggcctcaagtaatccatccatcttggcctccaaagcactgggattaaaggtgtaaaccactgtacctggccctgccttttcttgacactcttcagtctctggacccatctcttcatcccaggagccttgctttcatggtggaaggccatgaagctctgccagaaatgtcctcattaccctcaggtgccaatttattgtcacgatcttcaggagctgtcacctgcaacactgagctagctaacatgtcaactgtcccacattgcctgcaaagtcctccatggctgccatcacacatggagttgctggccagtgcctctcctccttgctagactggaagcttcatgagggcaggggccacactatcccattcctggttaagacactgtcatcagtacctaagatgctactggcccgtataggtgctccatcaatgtgaagtgaatggatacatgggggcagatggcaggatcattccgcgtggtgtactgcaaagtggaggccagccagttggtcttgctgtcaacatcccacgtgggaagcagagacagggcaagccagggagcgacactgggttgtgggatagggccacgcagttcgttctttcccatttgcagcagcaaccactagctctggcttgttcttccaggcccacatgtgttgaaggaagacaagcagccaggcacggtggcttatgcctgtaatcccaccactttgggaggctgatgcaggaggatcgcttgaggccaggagttgctgggcagcatagtgagaccttgcctctatgaattttttttttttctgagacagagtctcactctgtcatccaggctggagtgcagtggcacaatctcagctcactgcaacctccacctcccaggttcaagtaaggctcatgccccagcctcctgagtagctgggattacaggtctccaccaccacactggccaatttttgtatttacttagtggagatgggatttcgtcatgttggccaggctggtcttgaactgctgacctcaggtgatacacccgcctcagcctcccaaagtgctgggattacaggcatgagccagcacacctggccaaaatatacatatatatatatagtataaaaatatgtatatatgtatatatttttttaattagctgggcttggtggtgcacacctgtagtcccagctacttgggaggctgaagtgggaggatcacttgagcccaggagttcaggattatagtgagccatgaccacggcactccagcatgggcaacagaatgagacactgtctcaaaaaagaaaggaaggaaggaagtgggggagggagagagggaaaggatacataaaggaaagaagaggcatgatctgctgtaagccatgtgccatggactcctagaaaccacacagggatgtgcacacaaccacacactccccacccagggcacgctacatcacacacacaggaagcaggcacctgtgcagcacaaatgtgtgctgtggtgcatttcctcggcatgcctggtgtgacagaccataggacatgcacacctgatcccatgcgacatgcacatgtgtaaggggtgatgcagtgggtggcgcgggtgtgctggggtcacacacaccctgaacactgtagaggtcactgcaggctctgaccgagggatgctgagaagcaggagctgaggatctctccctgtagacaggcagggcaccagctcaggactccccttcccaacccactcagtgatgggcaggtgggtagatgtggcgcaggcgggacagccgttgggtttgtagactggctgaccagctgaccggctgactgacaggcagctctgatgctcgactctctgacagctccaagggaattcacgaccaaggctgagctgacaggaaccacccagctgaatcgtggatcctaatcactaaggcgagggaacagaatcactaaacgaaacaagtgcggtcagagccgtcaggcgctcatcggccagagacaggaagatgcaggctccgctcctctgcagatgcaccccagtgtcgctgcgctgggggcaggagctgcgctgcgggagattcagcccctgcaaagggaaccaggtgatcagcatgccaggagcagctgactttcaaccaatgggctctggctctgccccgctttgtgtcccatttggtgtgcacatttgtggatttgcaagatgcatatgtttggcacattttaccgatgaatttttagcccattttaccaatgaaacacgttcagcaaggtcaaggcacttgtccaaggtcacacagcagtgggtgtgtgcgctcagttttctctctttttttttttttttgagatggagccttgctctgtcgcccaggctggagtgcagtggcacgatctcagctcactgcaatctctaacctccacttcccaggttcaagtgattctcctgcctcagcctccagagtagctgagattacaggcgcccaccatcatgcctggctaatttttgtatttttagtagagacagggtttcaccacgttggccaagttcttgacctcagatgatctgcccgcctcagtctcccaaagtgctagaattacaagtgtaagccaccacgcctggcctgtcttctaatttttgatgtgctaagcctgcattaaaaactacaactccacatggaccctccagggtggtcctccgcgtggtccacagagggagggagtaagcctttgctctggtctgagccaaaggtcactgtgactgagtttgatcatctcagagcctaggggaagaagccccccacccagaggccaaagctggaggagagaggccaatacatgaccagtctgatgcagctctccagtgtgtctggcctgactgctgcctcccctcgaagtccacactctgaccacagagctgtcatcagggcccaggaacagccggctcctgtgctggggcagccctgccacctggaaccccacgtacctgtcccgtgtcctagggcagcaggtggccgtgactgtgacagaggctggtctccaggctgtgccctggggacccagcagagaatgtaagaagttggattttcccatgaacacagatgagaattgaagcccttgggtgaggcttttttccgggcgttctgtgcccaggagtccaggctgcccgctcattgctgcatgtgttgaaacttcagttttgcatctaatttgcatatgaacagcctgcctcagatggaggatgcagttcacagtgaggcagtcagaggcccatggggacaatgtgtccctcagccctggggcagtggagacctcacaagggcagagcctgagccggtgggagaggagccagagaaggtgtggcccggtcccaaagcaggccccggcctggcatactgtggatggtgaaaggagctggcagagccagtcttcatggccacccagccagggctgggggtggacagactcctccagtgggattgcccctgtctgcatctagccagggggctggcacctgctgcccagatgcgtgggcccttcccagctgggaggctccagccagaaccctgggcccagcttctgggaagccccatacccttcctcatgtccaaggccagctctcagtccagaaagcaccagcctttccacaggcattgatgggcattgtgccagaatgacacagatggacatgacacaggccctgccccaaacacaccgagaaccaacaacccttcactactgatcagcaggcgatctaaaccagcagacgagctgtttcttcacctccttcaggctatcctgccctgtcttcagaacatccagctgggcgtggtggctcatggctgtaatcccagcactttgcgaggccaaagcgggaggatcatttgagcccaggagttcaagactgcagtgagccaggattatgccactgcactccagcctgggtgactgagcaagactttgtctcttcaaacaacaaacaaaaaaacactcttaaagccccatgagatcacatgagaccctgtctgtactgggtcaaattgggtgcccgccccaccctcaaaaaatgctcaatcccagctccctgtgcttgtaaactgtgaccttgtagggtctttgccgatgtaatcaagttaggccactagagtgggccctttttaaaaacattttatttccataggtttctgcggaacaggtggtgtttgattacctaagttctttagttagcggtgaatggtgagattttgatgtacccataactggagcagtgtacactgcacacaatttgtagttttttatccttcacccccttcccaccctttccccgagttcccaaaatccactgtatcattcttatgccttcgcatcctcatagctcagctcccacttatgaatgagaacatacaatgtttggttttccattcctgagttatttcacttagaaaaatagtctccagtctcacccaggtggctgcgaatgccattaattcattcctttttatggctaagtactattccatcatatatatatatatatatatcagagtttctttatccactcgttgattgatgggcatttgggttggttgagtgggccctattttaatatgactggtgtccttataagaagaggagaagagacacacgtgtgcaacagctgtgtgaagacgaagcagagattgatcttctgttgttgcaagccaaggaacgcctgggctgtcgaaagctggaagagtcgaggaagcatcagcccgtacccaagaggcagtggagggagtgtgaccctgctggcaccttcatttcagacatctagccttcggaactgtgagagaacacatttttgtcattttaagcctcccagtttgggatactttgttacagcagctgcaggaacaaaccaaagcacctcccgtgatggttaattatatacgtcaccttgcctaggccatggtgccacagggtttagacaaatgccagtctttgtgtgtgtgtgtgtgtgtgtgtgtgtgtgtgtgtgtgtgtcagagagagagagagagagagagagagagacggagtcttactctgttgccaggttagagtgtagtggcgcgatctccgctcactgcaacctccacctcctgggtttaagcgattctcctgcctcagcctttcgagtagctgggattacaggcacacaccaccatgcccagctaatttttgtgttttagtagagacgaggtttcaccatgttggccaggatggtcttgatctcttgtggtctcgcgatccacctgccgtagcctccaaagtgctgggattacaggtgtgagccaccacgcccggccaggaaggcattttttagatgtgatttgctgtaaaatgtgtagcctttgagtagaggaaatgaccttccacaatgtgggtgggcttcatccaattagttgtaggcctgaagagaaaagagtgaagttccccaagtaggagggagtctcggacctccttcccatgcaagctgcggcaccaggtcttccctgggtctccggcctgctggcagattttagattgccagcccccagaatcacatgagccagtttcttaaaatcaacccgtctcgctctctcctctctctctcttcttcttcctttcctccttctctcctctccctgtctcgcttccctctctccttctcccctcctccacctctacctctcccttccctctctctttctctccgtctctttcccgcctccatatatatcacctgtgggctctctgtctctctgataaccctaactagcatgccacccccccattcagaacccttcatacttcccatggagtggagcctggcatttccctcaggcctctctcccccaacccgcccaccttctctcctgccagcaccctgcactcggggcaggccatctgtagctcagcactgcactgtgaggtcaggtgcgtgaccagctgtggggctgccccagggctcggaggcctttcttgtgtgcaccttaggtgtgggagctgcttcttcctaatgggggcatggaagcagcagggcagaggccggcagcctgggctgtccgggacaacagtgttcatcccaccagatgccactgtaaggagtccaggtggagccgaagctcagaatccgggtactgcacgtgctgaggaccaagatgcagtcgggaccttgccttcagggaactccccacccccagtcgggccagcctgagccaagagaagcagccaaaagccctggaggctccctggcctgttgggcaatggaagtggacgtggagtggacagcgccaatgggtgtggggcaacctgccagcagactcagccaccagaagccccgggcacatggaaacgcggccacacaaacggccccatcaggaaatcccaaaagaccaagaagcacgactcaaactccaccacagacagggacctgggactggcatggccgctcctgccctccttccccagttctctcccatgcctgtccctctgcagatttgactctttaaggacagtcgcagtgatgggagtggcgggacactagcatcatcgcccatcagggctcggggctgggacatgagcagccaatgcagccgtcattctcccaagagtgagccacctggggctgggggaggccaagggctcattcgaggcagttgggtcctgtcctcacctgtcagtgctgcctgtctacagggcctgaccaaaaggctgctccccagttaccaccctccatggctcctgggcagtggggattggggcttttgtgtggcaccctgcaggtcttcctcctgtgagcctagagaggagcgggcaagagacccttctccttggacatgctggtatagcctcctccccaactctgccccaaacccaggcctgatgactaagaaactggcctcacacactcatcagtctctgcctctcctcaatcaggaggcttttcagctaaacgctgagaacttcagccaatgaagagttcacactgtggaacacatttggcagtgcccataactcacgccttgtttattctcaccgatgctcttatcatagcgcatgtgttccagccactccacgcatgtcatctgtccagaaagagaaagtgcttgtttatttcttactgtgcggggggatggagctcccttacagattgtgaaccttatattgacaggagaagagaggtaactcaagacaccgaaagtggggtgtgcgtggttggtcttggattctgtcgcaggggtggaggtggggaggcagggaaggtgcgtggcagcattggtggcgttggatggaagaggaggtgggttgtggctggagttgctctgcaaggccactgatgttatctagattgtacgttttatttgggggcttgagaggggctggaggtggttatactgaggccaaaactccttcccacccataagtgccccccacggcactggtaccactgacccctggtggcaaaccttcctcatcctcgtgagcccttagctgtacttccctgagcgctgatggagctgtccagggtcctgacgtgcagcccacttggggatgtgcagacccctgccccaggatacctaaggtttctcctggttttcacttgcccagagccagcagtggtttttgcttcagcctttatctgactggtgcatggaagagcagttttcttcctagtggggacactaggttcacggcaaaggggaggtccctttagatttccttcattacgtttcttctttattcgaaagtgaacttgtagccaggtatggtggctcgcacctataattccagccctttgggaggccgaggcaggaggatttcttgaggccaggtgtttgagaccagcctggacaacatagcaagaccccatctctaactatttctaaaataaatgtaaattttttttctttttctttattttattttatttttttgagacaaagtctcactctgttgctcaggctgtagtgcagtggtgtgatctcagctcactgcaatctctgcctcctgggttcaagtaattttcatgtctcagcctactgagtagctgggataacaggcatgcaccaccacacccagctaatttttttgtatttttagtagagatcgggtttcactatattggccaggctagtctcgaactcccggactcaagtgatcagcccatctcagcctcccaagtgctgggatgacaggcatgagccaccgtgcccggcagtaaatttttaaaaatgttaaagtgagcttgtggggataggtctaatctttgcctgataagctgccgtaagtctaagggttgggaatagcttatggcaaactcaggctctacttaagatgttactgatctctcttactctccacaaggcaatttttcctttcaaaggaggaagttgcaggcaggttggctttatggacacatgtaaacaggaaatcaggagactcgcccagccccaggctttgtctagaaggaacttttcctctagttaatgccaagggctctagctcagcgagcattagagtgggacagccccagaagcttaggctcagagtccagaggtccaggagacagtgtccccctgtccagtcctcacaggtaaaatggaacaggaccacagcccactgccctccgaggctgtggggacagtgccagtgggaggtcatggcctcaggggctgcaacctcaacaagcacatggccttccatcttccccccgactggcaggatcccttttggaagtggcttctcagccccactcttggccaaatctggcatgactcatttgctttagaaaaggaatatataagcaccgtcacaccttgatgagatgacaggagtgacaagcagagtgatttcccatatctgagactctgaggaggagaggtggtttagcagagccagctgccataaccagaagaaaataattaaggaaatctggcagagtagaggaaaaccaagtggtgcagcgggtcccttctagtgaagggagctgtcatcatcggctgcgggagagaaaggagctctggaggctcgtgctgggacagctgcagtaatgatgggatggggaagaggagggggtggctgtcaaggagggaaatagactctgggcatggcagggggtggcaatgagcagcttgattctaaagactcctctctcaggccaggcacctgctacttacaccccacaccctgaagggtgcagccaggtctacttggagcttcccctcagtctccagggaagagtctagaaggcctgtttcaaagatcccccacatgcacgcatgtgcacataagcttgggagtgcccaggaagatggggacactctgccctttgcccaggggagagcatacccttgttcccagcccaaagggacaagcggaagaaagatgaaatgtgtcccagttctgcctgcatttctgcctctcttgggacttgaggaaggttcgggcaagctcagggaattcaggctgtccattccagggctgaccttgcatctccttcctggcctgctaatgactgaaggagacgtgcgggcacggcctcagccttacattgtctggggcatggcagtggctgagtctgtaaaactggacctcatggagaaatccacagaatctctggctcagggaagacctggagatcccttcaccagctgggctcctgccactggacctctgcccaggacgtggagacagccaggaaagtggtgggacactggaacccccctcccgcaggcagcagccaggatttgctcaggtgtggtcgggcatggtgccccggcgcgccagccagaagatccagctctctccttaagggatagctggctctgatggtgaccatggcttttggcagagcctcaggacgaaaatgtccacccacatggtactggagcagaaagagcccctgattcctcggtggccaggtagggactggggaaggaggctccagcttctaaatagattccccccaaagggaatctccttgtcctcctgcgactttcccccaaagcagaccaaatgaggtatgacacagaatattctgctctggccaaaggttcacctcaccagagcttgcttcttaggtgagcccagcccaggcatgggcctccttggtaggcagagggggcgttccagagcatggccattgatgcactggtctctctgtgtcttcctgaggtcatcagtaagttaacgctggacaattaccctctacctgggcgctgcttagggctttgggggagaccagggcgagcaagatatgcttagctcaccccagaactccagagccagctgagaaggccaagatcacaaagcaaatgcccaggttagggaacttcctgtagcaagaggagaagaagcacgttccattcctaggcctggtgtgtgcaaaggtgtgggtgtgaatcatattccaagcatagagaatccacagtggccagaactggggcatggctgatggggtgtggagagagagtggatcgagctttctgaagggtcctttccctgtgacttaatgacatggtggggtgcaggaggaggtggcctgtgagagtcctggctgctccacagggcaggtatgggcacacctgggcagggtgcctttccagaccttgtagatcacatcaggaggcaggcgtgatgcagagaagagagcctcagctgcgagccagtgggaccacatgtttgctgcgtccccattttctgcatgggtaggggatggaggggctccagcactgagccatgccctaagctgcctttccctagagcctaccccaagatccctccagcctggatgtccacagccagcagcccataagcagttccctgggagccatgtggcagatccgctaatactgtcctctcctctgtttgcttttcaggaataaagttcaacatcaggccaaggcagccccaccacgtaagttctgagagtcagataaatctcagtgcacacagcccttgggaaactggggagggctgggaagaaaattaggagctcacattggatccattcttggaaagaaaaatgtgtccagcctttcccaggagccttgggaacaaagcccagggctctggacccatgaattttcccttccttgttagaaggcttctttgcacggtgctaatagaggccgtaaatctgagcccgcctgcaggccacctattcccgccaccctctcccaggccaggttcctgggaggaccgcgccatcttgtggccgaaatgacacttacacctcagcgggagggaggcctttgggtgccgggccagggctcagaccggaggggtctcacctacagagtcagcctgtctccctcacctgagagggacaggaaccccagccgtggtgagagcctgacctgtgtggccctcagtgcccagctgtcctttccactcagataaccacttctcttcttgccccaggacctcccaccaggcggctcccaggatggtgacttgaaggaacccacagagagggtcactcgggacttatccagtggggccccgaggggccgcaacctgccagcgcctgaccagcctcaacccccgctgcagaggggaacccgtctgcggctccgccagcgccgtcgccgtctgctcatcaagaaaatgccagctgcggcgaccatcccggccaacagctcggacgcgcccttcatccggccgggacccgggacgctggatggccgctgggtcagcctgcaccggagccagcaggagcgcaagcgggtgatgcaggaggcctgcgccaagtaccgggcgagcagcagccgccgggccgtcacgccccgccacgtgtcccgtatcttcgtggaggaccgccaccgcgtgctctactgcgaggtgcccaaggccggctgctccaattggaagcgggtgctcatggtgctggccggcctggcctcgtccactgccgacatccagcacaacaccgtccactatggcagcgctctcaagcgcctggacaccttcgaccgccagggtatcttgcaccgtctcagcacctacaccaagatgctctttgtccgcgagcccttcgagaggctggtgtccgccttccgcgacaagtttgagcaccccaacagctactatcacccggtcttcggcaaggccatcctggcccggtaccgcgccaatgcctctcgggaggccctgcggaccggctctggggtgcgttttcccgagttcgtccagtacctgctggacgtgcaccggcccgtggggatggacattcactgggaccatgtcagccggctctgcagcccctgcctcatcgactacgatttcgtaggcaagttcgagagcatggaggacgatgccaacttcttcctgagcctcatccgcgcgccgcggaacctgaccttcccccggttcaaggaccggcactcgcaggaggcgcggaccacagcgaggatcgcccaccagtacttcgcccaactctcggccctgcaaaggcagcgcacctacgacttctactacatggattacctgatgttcaactattccaagccctttgcagatctgtactgaggggcgccgcagctggccggggccgccctgccccggtcactcacctgtgctcccgggcatcctcctgtccctggctcctcatcctgggagcaacagggctctgaggacgtgaggagccatcgctgtgggaggcagcaggccccgggtggggggcagaggcgcccagccttggatggggaccccagcccctggcctgtacctgtttcctcattccttggctgagggagaggctgagaactgggcagacacccctggagctcagccgacagttttgatgagcagggaagtctgaggcccagaggacggggggcccagcggtaagggatgtcccgcactcccttagccattgccttggaccaaaccacgtggtttgcagcttttctacgagccaggggggaggttcccttggattaaggttccaaataaagcacatggtttccagagcagcggtgtgtactctgtggtggcgtgggagcacgtggaccctgggctgggctttctggggctctttctgccttcccggggcagcttgagccaggtgctgcaggccccactgcagagaagtccagttcaggagcagcttcctgggagaagagcacagaggacccagcggctctcagccaggacctgcaggcgtctgaggctaggtcccagtcaactggggtgcttccgtctcagtcctggcacattaatcctgaaaggaaaagataggcctgttcctatgggggcctcctggggtgtcttcttatcagtgcaccttgcaggggcctctggggactgccagagcagtagccagctctccaggcaagctgccaatcagggctgaggccggagccagggggcacggggcatgcatctcggtgggtgtggtactcccagcaggaagcaaggctgtccctggctttctgcacctctgagccaagcaggactctggcctgaggctgtcatctgcagacactcaccctgatccctggccccactcaccctgatccctggccccactcacctgacaaaaccacctcagggctgtcaggatgcacatgctctggaggaggagaggagaagccatagaggaaacttctccaaaagcatacatgttcacaccagagagggctccagaagtgtcagcagtcaatgtggttctgggaaggtctgggaggaggtgtttgttggagtgttgagtgtgggcatgagtgtggctgcatttgggttttgtttgtgatgggaagggctgcctgactctggagtctctgccctctgtcagcctgtctgcaggagcctctgcatgccctcctgggtcattctgtgggttgctctgtgggccctcccaggaggctgccctctgtctgtccctatttgctaggggagatgctgctgattctccacgtggaggtgccactggatccctgggtggacccccaggtggaggccctgctgattcccaggtggagaaactgccggatccccaggtggaggaactgctggatccccagatagaggaactgctggatctccaggtagaggaactgctggatccccagatggaggaaatgctggatccccaagtggaggaattgctgatccccaggtggaggagctgctggatcctcagttggaggcgctcctgtattactagttggaggtgcttctggaatctccccaggctcacaccagcctgagctgctccatctccttttctgcctccatcttggaccctggaacattgcaaaggggaacaaggcactgagccttcctcctgcccctttggggtaacatccatccaggagatctgagaagcagggagacctccctcgggttccagctggaagcggcttggaccatccaacagaagtgacccagaggggcagggaagaggctgtggtcagggcctggggaactcttgggacccgtggaagctgagacagcagatgctgaggggcccagaaagccagagtagctgccctgcaccttggccaggaccagggtccatgtgagaggagacagggaagtgcctggctgaggacaacctaaaaagaggtgccctgggtcccggtgctcaaacgtgagaccacgttcatgtgcaggaaagtgtccctggtcatgggtgcatttggtgaagccagaggcagtgcccctatggcatctgctcagcagggaacacctgaactctccgctgacacagcatctgggagcagcttggagacagtgaggatgacacagcccctcccctgggtgagcgtgtgtgtgcgtctgcatgtgtgtgtcgggggagaaggcacatgcacttgtatcatctctcagagaaacgccggctcaagctggacagacgtggacacacaacgcatccatcagtggggggcttttgttgcaggtggtgatgacagaagacaggtgcaggcagtgaccatgatcaccacttgacagccctgagagtgacctccaactgaaggccagaggcccagcctggagaccaacccagctccaacccccaaccccagccccaaacctcacagggctcaggaagagccgactcagtgcagtggtagggaagtatgtgtgtgtgcacgtgtgcatgtgtctgtgtgtgtgtctgggtgtctgtgtgggtgtctggcctgtgctgtggggtgggtggatgtgagcgcgtatatgtctatgtgtgtgtctggcctatactctccacatgtgtgtttgtgagtgtgtgtgtttggcctgtactgtgggtgggtgtgagcatatggatcatgtgggtgggtgtgtttgtgtggatgtctggcctgtgctgtgggataaacgggtgtgagcatgtgggtgtgtgtgtctggcctgtgatgtggggtgggtgggtatgagcgtgtgtgtgtgtgtctgtgtctatgtctgtgtgtgtgtgtgtgtttctgccctgtgctgtagggtgggtgggtgtgaacgtgtgtgtgtgtctctggcctgtgctgtggggtgggtgtgagcatgtgtgtgtttgtgtctgtgtgtgtctctgtgtgtatgtctggcctgtgctgtggggtgggtgggtgtaagtgtatgtctgtatgtgtgtttctgtgtgtgtctggcctgtacagtgtgagtgtatgtttggcctgtatcatgtggatgggagtgagcatacaggtaatgtgggtctgtgtgtctgcgtgggtgtgtgtctgtgtgggtgtctggcctgtgctgtgggctaaatgggtaatgagtatgtgggtgtgtgtggggggagggaggtatctggcctgtgctgtggggtgggtgtgagcgtgtgtgtgtgtgtgtgtttctagcctgtgctatggggtcagtgggagcgtgtgtgtctgtgtgtgtgtgttcctggagtgaggggtgtgcattgtgtgtgagcccgcgtccatgccgggtgtgggctgtgtgcagtctgagtcctgcccgtctccaggaccatctcgtgcacctgctcctcgtctctccctgcccattcgctggccattttgtggatgtcacctggaaggggccaactgatcagagaccctagaaagggccactggcagctcccaggggcaaaggaggcccattgagttgggagaagaacagcccaagccccagggccctccccagcttggtccccctgtgggcccctccgggcggccccagggaagtccctgccaggcctctgcccttgagtggctgagacctcctggatgggagccccactctctgagtggtgacgagaacagacgtcccaaagcctagggtccctcctggggcttgggagccccaaaggccttgagtatcctggggagataggattcaaggtccacacagatggtcaggtgggaaactcgggcagttctggctccccccagctccccctcctccctgctgtctcgacagggtttggtggcccatacagggcctgtccaaggggcccaggacaaagtcaggcaggcagtggacagggggtcccccatcatctccccctactctcaggcagggtttgccaatttcatcctcagggctgagccccttggtgggggacaggagcctgtggagcccatggttctgaggcctggaggcggcctcacctcactgcccctatctcttcttggccccttcctcttcagggagcactcgtggtgaacccagcgaacatcctgctggcgtccctcactcctccactgctctacaagcccaggggacccagagctgggcacaagaggctgtgttgaaccacgggatccagaaatgggcaaaggtgaaagttgggggtggggtagtctgggctcaagtaacactgcccctacctccggggactcccagctgatgggtaccatgactcctgaatgaggaataggcaggcgccccggggagcagggtgtggggagaggactgtatgttagccccactgccctgcccgggccggggagggggtgtgggagccctgagctgggttcttcacactgccctggcctggctgcttgttggcccttctcactgcccagggcacgctttgcacaagaggctctgttgggagatggcagcagagggggacccggggtctgggccaggccggggctactaggggactatcctcctgcctctccttcaccctgggccggcctcaggaaaggaggagcaggggagcagctggaggtgccaagagctctggaagctagggaagggggcagggggcaggggcagagggcagagagagcaacttcctgtcacgggcctgggcgacccttccgcgccacctgggtatgccagcctgagtcaagtggacagtgagtgctgagcgtggagaagtgcaggtgcgtgcgcgaggtgtttaaagaggagaccaagggactgggaccctgagtgtgtcgggggtgcaggtgtcgggggtcactcgtgctgggtgctgcgctgtggcctcgtgtgcgttgcccagtgcccctctcccagcggtgctgtccactcatgcctcgctctactgtataggtgagaagactgaggcacagaaaggcgtggccagagctgtgcagcgcaggagttggagctgggattgcgcccaagcggccggcaggggctccctcgcgttcgtacccacaggcgcagagccgttctccgccgccaggtggggctaagtccccgctcccgagcagcggcttggggatccccggcggggccgccaggtggcagcagcgctctggccgcgcggctccagctcccgggcgccccgcgtccccagcctccccaccgcgcagtcggctcctctgtcacctcgccctcccaaccatggggtcacggggctcccgcccctccactgtctgcgggcggcctccagaggttactctcaaacccaccagctccaggggacccgcctgtgctaacactaagcccccaaacacccgcagcgcccctaaagcagtgacatccacaacctccccgggggcttgtcctgcacgctccatcagggtgatgtcaggccttctccaacctcaaccacaacacgaacgcacacgcgcaaacacaaatgcatgcacacacacaggcacagacgcacagacacacacaaccacacacacagacacacagacacccatcctcacaaacacacacccagacagatatgcagacacacgcatgcacacagacccagatgcacgcggacacacagacacacacgtaaacacacagaaacatgcacggctcaggacggggcttcttgctgcattgaaataaatgggaagaaccggaaggtccctcactgtctcagccaagtgcatgcacttcccacgctgagccctgtcctccacttcccctcctgcactggccagaggtcacccccgacacacacacacacacacacacacacacacacacacacaccagatcccagtcccttagcctactccttaagcacctcccgcgcgcacctgcgccctctctgcacacacagcaggctttcccatcagcagaaaacaagctgtcaatgccccacctttaaaaacggggaagccgtagccagatggcccctgcagcgcctgcccatttctctcctctccttcctggcagaacccacccctcagcccccatggcttcacctccttttccactctggaccccaccctggcctgccttccaatcttgccacccgcagagtccgctgacaaggcaccttccactgccgcacgctggcaatcccaggcactcttctgcctacacactccctgggcgagctccccatcacccctgtgctagactcccggatttgcccctgcagccctgatcggtagacccccatggccagccgcctcacccccagctgtcggcacgtccagcgggtgtctccacttgaacgtctcacctgagccgcacacctttcacacctcaagcccctcctctcccggcttcccggctcagccttccctacaagccctggatcgtccctttcgccctgcctcccaagggcatactgaatccatgtccattctccctctccagggctgtcatttaacccaagccattatcacactagcatctcctgccttggcacctaaagtaataagtaactatggaatttaccggtttaccaggtactgctctaagtatttcatattttttgtaccctgcccctcgcgatcccggctgactgcaaactccgcctcctaggttcaagaaattttcctgcctcagccccccgagtagctgggatcacaggggcctgccaccacaccgggctaatttttgtatttttaatagagacggagtttcaccatgttggacaggctggtctcaaactcccgacctcaagtgattcactcgcctcggcctcccagagtgctgggattacaggcttaagccacctcgcctggctagcgtttcacatataagagcttatctaatcctcactacaaccctggaagaccgttatcatcctccccattttttgcagatgaagacattgagacacagagaggttaagtaatctgcccaaggccacacagctataatggggatcttccagaattcagagcctgatggtttggccctggctctgtgtgcccatgagtgcacagttcttactggctctctggtgttccaatggggtaggaggttttgcgacagcagagaaggaattgaatggtcactagggcaagggaaagacaagctctctggagaaagagagggagtgtctcaggcattgctttgcacccatttgcagtttatgatggatgtgcagggcaccagcatgccttcctgctgcagcataagcaaggtcacagcggggctcctcctagacctgtgtgacagaggagtgaaggacacagagaatagtcacccaatcaggacaaggctggatgaggaagggcatcaagacaggaagggctgataggcagagagaaggcgctggggtctgcggaggaagtgaggcgggagttggggacctgtgaccttggagatggtgtggtttcctgtggtgacaggcaaactgtggccaggggtggcagtggccaggatcacgatgatgactttcacctctgcccaccatgataatctcctggatggagatgacctcggttccagggcttgtgaacaagtcacgccccacagagggaccctcttcagcctcctctggggtctggtgacacggtggtcctgtacctgtgcctctggctccatcagttcacacttgctacctgcctgcttacctgcctgctgtcacctgttccagcctgtatccacctgcctgtgactacctgagtttgcctgtgaccacccacacccatctgtctctctctgccttggtgggtggtggttttggggctacaggtcagccccctcctccgcgtgcagggcctgagagcaggggcgtgggagacggagtctgccaatctggccgcaccagctggagatgagcccaggactgctgacgcctccagcctgcctctggggagaccatgctgtgtggatgacagtcccctaagacccggaagcgagccacgtctgggaggatgagatggggtcggcaaatctgggccgggagggaaggctgcattcttgctctccaaaccgatgtgctgaattttacttttccttttagttatttcttcttcttaaatcctgtttctctccctgaggcagctaatctattatttaacatcggattgtgggattgaaactccaaggcaaattgaaaattatttgtgtttgaggtttcaggcgtgaagctgaggcaaccatttctgagagatcctgagaacccgggcaaaggtagcgaacccacagcactgttcctggaaggggctgagaggactggggtgcaggaagcgttccacagacctggcaggctggggggccccgctatgctccagccttgcccacccaaagcccgcagctcgggggtcattaatctccatgtggcatttcacttgggaaatgctgtcaacacctcccactggccaaagtcctcaagaggctgggcaggtgccatcagtcaccctgggcctgtgcccaccctgggggaaatgcctcggtcatgagaggattaatgacacgaggagaagggctcgtcatcatttttcaaggttcggctctctgtagatctgcaggcaggattgctggcctaacagtcagtggagagtgacccaaggctctggagagtgaccaaggaacacggctgagggtggggggccctggcctggacccccgctgagtgcccgaagactgatggagcatgcgacctcctagcgctggctctcaggacatgaatcgggaccagaaggaggagtgggcttgagcccaggggagtgtgaacaaacactgtgtgagccccacatagacatctgcggatcacggaatgggggaactgggagacgccaggtcagggagatccttggattttggataagggataaggagattggattttgtgttggaaacagcggaaccattgaaggaggggtgtactacggtcaagttccatgcccagaaggatccagaatgaggctgaggggctgtcttcatccatcttagtctgtctgggctgctacatcaaaaatcccatagactgggtgactcagacaacaaacaatttctcacagttctggaggctgagatcaaggcgccagcagatgcagtgtctggggagggccggtttcctggttcatagggggccctcttcctgctgtgaactcatggcagaaggggtgaggagctccccagggcctcgtttatcagggtgctaatcccattcacgagggctccacccttaggacctaatcaccaccaaaaggccccacctcctcacaccatcactttggggttgaggatttcaacataggacacaatattgtcaggggacattcggcgcatagaagaggctatcagcacatctccatccaacacttagagcggtcacacgtgtcaggccttgtgctagacctgggtgatggcacccttatgcccccagctcagaacagagctgagcatcgaggatctgggaccacagagaagtgggaggagtctcccacaaggtcctctgccacccagatttataaaggaaagaggtttaatcgactcacagttccacatggctggggatgcttcaggaaacttacgatcatggcagaaagggaagcaaacacgtctttcttcacatggcagcaggagagagaagtgccgagcaaaggaggaaaagcgtcttataaaaccatcagatcttgtggaactcactcactattacaagaacagcacgggggtaaccgcccccacgattcaattacctcccagtggatccctcccatgacacgtggggcttatgggaactacaattcaagataagatttgggtggagacacagccaaaccatatcaccgtgggatctcaatgaaactgcagccatagctgcccatcatgaactgggtcctgtcagaaccaccaagtcaaaaggccaagtggactcagcacctcctatcaaaagatagaagttggccagatgcagtggtcacacctgtaatcccagcactttgggaggcagaggcaagaggatcgcttaaggccaagagtttgagaccagcctgagcaacatagagagaccacgtttctacaaacaaaaagtaaaaaatcatccaggtttggtgatgcacacctgcagtcccagctactcaggaggctgaggcaggagaattgcttgagcccaggagttggaggctgcaatgagctgtgattgcaccactgcgctctagcctgggtgacagagtaagaccttgtctctaactagtaataataagatagaagtggcacacccaggatcaagtgcaagcagggtgggaggacacaagcgagctgtgtgagcagggagcctgggcaccttgggatccccactgctgcactgagacctcttcctcagtttacctctgaggccatatggtgaggggcatgatcagctaatgaaagaggaaaaggctagagcttttttcacagatgtgttggcttgtgtagaagcaggtaaaaagtggatggtggccaggcatggtggcacatacctgtaatcccagctactccacaggctgaggtacaagaatcacttgaacccgggaggtggaggttgcagtgagccaagatcgtgccactgcactccagcttgggcaacagagtgagactccatctcaaaaaaaaaaaaaaaaaaaaaaaaagtggatggtgaccagggtacagtggtcacatctgtaatcccagcacttcaggaggccaaggcaggaggattgcttgaggctaggagttagacaggcctgggcaacacagcaagacccccatatctttttttttttttaaataaaaattcaaaataaaagctgatggtgtctgcactgcagcagtggatggtgtgtgcaccacagctccacccaggagtggcctggaaagatggtggtaaagtgaaatactcccagtgggtagagctttagacaccggtcatccactttggtgaaaagggaaatggcctgagttcagaatatacatggactcatgggcagtggccgatggcttggccagatagtcaggagcctagaaggagaaagattagaagttaggagacaaggggaagtcatgtggatgggacttggcacaaagtgtgacgatgtctctcacattagcactcattggaagaggcaccaagcaaccaagtgggcagaactacttgggtatgcaacatcagccagcttctgtcattggcttcttcacggctggtacaaaaagcacacacaaggaggacgtggtgacagggatggaggttatgcatgggtccagcaacaggggctcccactcaccatggttgatctagctgctgctattgctgctgccaaatctccaattctccagtaacagagacccacactaagtcccaaatgcagcatcattccatgaggacaccaacctatcacttggtggcaagcccaccacactggatccctttcatcctggaaggagcagtgattcattttgtcaggaataaacacaaagtctgaggatgggtttgcctttcctgcccacagggcccgagccagaccacaagcccaagggcttacagagtgtctgatgcacagcgcagcatcccacgtgccattgcatcagataaagggactcactttacagaaaggaggtgcaagggtgggctggtcatatcatctaccgtatccctccgaatctgctaatctgataagcaatggaagggcctgttgaaatcacagctttttgcaaagatgaggtgccattctccagatgaaagtaggtaccttaaatgaacaaaaggtggacatgggtctacctgggtgtggtaggcagaatcatcacccttttcccccaaagcgatctgcatcctgactcccaggacccgtggttatgtaaccttacatggcaaagaggaccatctagacaggatgtgattaagtgaaggatcttgacgtggggaaattatcctggattacctgggggtgaggggcggctaatgtaatcacaagggttctcctagctgcaagaggaaggcaggagagtcactgtgggagtgatgcagtgtgaaacggattcaaccagcctttgctggctttgaagacagtgggagccatgagccaagggagcaacaggccccttgaagctgagaaagacaaggaaatcattcctccctggagcctctagagggaatgcagccctacctacaccttaatttccaccctgggagactcatgttggactccaacttcctgagctgtaaagtaatagatttgtgttgttctaactcaccagatctgtggtgtgttctcacagcagcaacaggaaaccaacaccctatgtcctaggtaagatgggtctgggaaccaaagagcggatgcaagaggtcctgcttaccctcatgctcatctgcccacttggagaacatgtgcttcttgttcccacagacctgggctctgaggatttggaaatcctgcttcccacatgagctatgcgtctatcaatgaacacggcaagagtcctgtggaactgtaagctgtggctgctgcctggacactttagactgcttgggctaagacaccagcaagcaagatgagttaccctcttggcaacttagctaagtgacatcagccagcttctgtcattggcctcttcatggctggtacaaaaaacacacacgaggaggacgtggtgacagggatggaggctatgtataggtccaacagcatgggttcccactcagcatggctgacctagctgctgttgctcctgccagatctccgattctccagcagcagagatcgatgctaagtctggaatgcaccaccattccatgaggacacccacccttcacttggtggcaagccgaccatactggatcgctttcatcctggaagaagtagtgactcattttgtcaggaataaatacatattctgagtataggtttgcatttcctgccacaggacctgagccagaccacaagccctgatcatcagtaagagggagcatttttattatacagtggggctgggagaaatctatttggtgtctggttaatccacttggatgcttttcgatactcccttgcccagttttgacagcgaatgggcaagtgcagcaactctggtctgagaaggtgatgttggccagagtctcagacccctcagggatgaagatctggtttttccaccaggtaagcccctgagaccaggttgctgttcgctgagggtgcaggagtcctgaagagataataaggaggagagaagctgagtatctgttgcagctccaagaccaactgtgacagtggaggctgtaatctttttttttttttttttttttttgagacagagtcttgctctgttgcccaggctggagtgcagtggtacaatttcagctcagtgaaacctctgcctcctgggttcaagcaattctcctgcctcagctgggattacaggcatgtgccaccatgcctggctaatttttgcatttttagtagagatgttgtccaggctggtctcgaattcctgacctcaagtgatccacccaccttggcctcccaaagtgctgggattacaggtgtgagccactgtgcccagacagctgtataatctaatcttcttctaagatcccccagggagaggcataccagaatcctggaggagctgggtcccttttctctccctgcctctctagagagggttcagcctggtcaggtggacagccggctggaattggggctggttggctgggactttgtggtcacttaggtccagaaaagcagatcatggggacaggcaccagggttttaaggacatcgttaaatacctcacaagacagaccctggctgcatgtcttctaacccacgatggcctcagcttaacgagtcctaagaaagaactagccctccttaagtcattcctagagttcttcaatagcagccaaactatacacatgaaccaacccctccaaacagcatggctatgcagcaggtcagaagagaaaggcatgttggacttaccactgggctttggggggagctgcttcacctccctgggcctcggtttccccatgtatggaaagggccagtgatatggtctggatctgtgaccccaccacatctcatgttgaattgtaatccccagtgttggaggggaggcctggtgggaggtaattggatcacaggggtgatttatcatgaatggtttagcatcatctcttagtgctgttctcatgatagtgagcgagttctcccgagatctggttgtttaaaagtgcgtagcacctttccccctcactctcttgctcctactccagccatgtgatgtgcctgcttccccttcaccttccgccatgattgtaagtttcctgaggcctccccagccatgcttcctgtacagcctgcagcactgtacagtgagccaagatctctccacctcttttctgtataaattacccagtctcaggtatttctttatagcaatgcaagaatggactaatacagccagctcttcccaagccagcacattccagcaccccactccaaggaatccaagaattccagaccgaacccgggcttccaggtcattatgaaggtatattcatcaaggtgggagaatataatgtatgttattaaatagttgctagcttgatttacaccttttaggtatttagacatatgatacgtggatctctatttatcctcttcttctcagccctgaaaatgttaggggtgggccaagatatgtaatacacacacatgcataattttatataatatctatagtatatataacatatgattatatatattatataattataaataatagagtaacatgtatatcatcccagtctaattcgtgtatggatgtgtatacatacacacacacacacacacacacatacagatatatagtttatagtcagctattgccgtgtgacaaagacacacacaatttcagcggcatacagtgataagcacgaatttctcctgtgtctgtgggaggcttatgcaaccccactctgtgtatgtcactcgatggctccagtctccagctgcctggagcttattcttatggccacagcagaaactccaagtccagccacagaagcacactttaagcctctccgtaaagccactacctgctaactcccacttggtgaagccccgtatcagggtgtggagaagttatttctgccaaccacgaagctgtagcaagggtgtagttgtctctaggtactacagggcagggaaaaattggaatcaataatttaacccatcacacataccaaacagaggttccctaggaagaagaaaatgagattgtcagggtgtgggggattaatttgtaattagttctaattactaaaagaatcgatgttttaattttttacaaagtatctgtattcccatattctttctgtaataaagcaaaaatcagaagccctcaattctccccaattccagttaaaatcctaataaatacaattgttacgagttgattcctttggaagactgcctagccattttgaaaaataaattcttttttagatacagacctcaaaccataggcagaagttaattccaaaaggatgagagacctagatgtaaaaacagaactgtaaaaattcagagggcgataatattatgaaatatatcaagacgtttttcttttttgcacttccttgggtgaccttctagcttttcagccagaggctcgcattgcctagaggtggtggcagatggagggagggagacgaggatgagggagggagggaggagggaagggggaggaggagaagaagaagagagagaagacagggaagagaggagggagagaagggtgacagggagctggttgagggaggggacacagagcaggagacagaggccccatgtggatcaaaggagtgacaagggagggcccatgctcagtgatatgagaacagcaagaggcaacaaacaagatacaaaaggatacacacttccatcccattcatgtacaagtttaaaacctacacaagtgttaccattgtttatgaacatatcccaatgttgcaaaaagtataaaagggtgcacaggagggatacaactggctggggaggaagggaggggtttaatacatctgtatcatttcgtattgttttttaaagaggatctgaagcaaatattcaaaatggtttgttacatttgggtgtctgttacattattttttacgttgtgaaatgcatgcatgatggaggaaaggcaggctgtgaatcagtatgaataggttgatcccatactttaaaagcacatgtgtgagtgcctgtgtgcacatctgtgtgctcaggtgtgtgtgtaggtgtctttttacctatggttctgtgcatgtctgtgtctgtagattatgtgtgtgggtgtggtatgggtacgtgtgtgtctctttgtgtcgcttgtgtgtgcatgtgtctgcgtatctgtgcaactatatgtccgtgtctctgcatatttgttagtatgtgtgtccatgtctgtgtctgtgcaattgtgtctatagttatgtttctgtatgtttgtcattgactgtgtgtatttgcacgtgtgtgtgtgtgtaagtgtgttttgttttgttttgttttgttttttgagatgtagtctcactctgtcacccaggctggagtgcagtggagagatcttggctcactgcaacgtccacctcctgggttcaagcaattctcctgactcagcctccccagtagccaggattacaggtgtccgccaccatatccagctagtttttgtatctttagtagagacggggtttcattatgttggccaggctggtctcgaactcctgacctcaagttatctgccctcatcggccttccaaagtgctgggatcacaggtatcagccaccacaccgagccactgcatgtgtgtatctgtgtgggtctgtgtagttgtgtgtctgtgtgtgcctgcacacctgtgtgtttataaatagaaaaaaaactagatggacaaatgtcaaatcattgacacagttctttctgggaaggggagacagaggacttttgtttccctttcacacattttatggtgatacattattttttgatgatgatgatgatgtattctttatttatatttttaaatactttttaaaaagacagtacacggaggccgggcacagtggctcacacctgaaatcccagcactttgagaggctgaggcaggtgggtcacttgggctcaggagtttgagaccagcctggccaacatggtgaaaccccatctctactaaaaatacaaaaattagccaggtgtcatggcgcagacctgtaatcccagctactcaggaggctgaggcaggagaaacgcttgaacccgggaagtagaggttgcactgagctgagattgcaccactgccctccagcctgggggggagagtgagactctgtctcaaaaaataaaaataaaataaaagacagtacagagtttcacagcttgaaaaataagaatttaccagccgactctgcactctgctccagggctcctcccttgagccgcactttgctttgcctccggggcctggatcatccatcccacccatccacaagggccctggggacagaggagcctggggacacttcccggcccaaccccaggggcacagcccaaagcaatcatgacatttctctggagtcttgtattttatctttaaatgttaggcagagtttacgttctcccttgtaatgtatacatgtttgtcttgctgacttgtttgtcaattctggagtcaagggggcactcaaatggactccactgggcacttgtctgtaaacccagcactttgggaggagaaggcaggaggattgcttgaggtcaggtgtttgaaaccagcttgggcaacatagcaagaccccatctctctactaaagatttttttttttaagatggagatttgctcttgttgcccaggctgaagtgcaatggcacaatcttggctcactgcagcctctgtctcccaggttcaagcaattctcctgcctcagcctcccgagtagctgggattacaggcacatgccaccatgcccagctaactttttgtatttttagtagagacggggtttcaccacgttggccaggctggtctcaaacttttggtctcaggtgatccgcctgccttggcctcccaatatgctgggattataggcatgagacattgtgcctggtctactaaagatttttaaattggcccctgatgtagtggtgcacgcttattgtcccagctacttaggtggctgaagtgggaggattgcttcagcccaggagtttgaggctgcagggagctatcatcatgctgctgcactccaacctgggcaatggagtcagcctcatcctcttaaacaaacaaaaaaagtgaaaggggactctgctgtacgcgccttcctgtgctcctgtgcatctcttgtgggtgggctctgggcaacggtacctgaggggtggagctgaaaccatggcttgacgggaggcatgttggaagaggaaatcagccatcagctctaaacaacagctgctacttacagagcactcacactggctgggccgagttctttgctttgctgtgttctcccatttaattcttccagcaaccccacccgttaggtcctatctctgttcccacactacacaggaggacactgagactggagaggtaaagcccaaggtcaaccagctgcactcagattctcaagttgatgctctgcacagactgtctactacagggcaggcccaaggagaagggattgcctgtcacatggaaggggctccatgtactgggcttgggtccaaggaaggagagccctgggtttctgatggaacaaaggccactctcattgtctaaacttttttcatgggaaaaactcccttggacccttgcaaatgtatctgcagagcctcaggtggtcacttggagccagagtggcagccacacacagtcacttggggcaggattctatggaaagccattctcccacggatcccgtctgggcttatattgattgagaaaagtggaggactcccccgacccccctggagagggcctccctggcatcccttgactgcaacagcctaatctgttccaacaatcttctcagcgctgttgcacaagaagggctacgggtccctgggagtgctcttgaactttccccagtgtcaggccagctcagggttccgtgcttaaaacattcagcggcccagccctcaacacagaatccatcctctcctccccaacccccacccccccgccccactcccacccccagggaaagtctgactttgcccagtacccacttccctcccaggggttcagggcagcagtcccattggcttgtaacttggcatgtgacccagtttttgccaataggacgtgacaaggagggctgtgggagccactaggataattccattgttttctataggtgtccaggcaggtgtgaagctttgagctctgttcattttgagaccagagaagtgctggcatgagaacaggccaacgtgctgaggatggtagaggaaagctggggagagctggtccttgaatagtattccaatccactgattcacctccaggcgcattctgtgaatcaggtgttctatcatgaagctattctgttgcagcctttgctacttgcacccaaatccatatagcatttgagaatttgatggaaaaggctcaaatgcagttttgagcaatttagggggctgctggctcccccacaggctgcaaaaatgttaaaattcctggtcaggaggtcttagtcttgtctcgttctcaccccagtgctggctcccagggccggcagggttggtttggttcagaatggcacacccaggctgttggcagaaggtagaaaggcaacccctgccttcctgcccactaggagtcctgagtgcccactgagcgtggtgccagggactgggcaagggcaatttgggtgaggggacaggtgaggggactaacagtcccatgtttcgtcactccctttagtctccagattctctggggtcctaactaggagggaagattggggggattcccagggtagaggcggaggccaggtgggtgtgaccgtgagctctggtccaggctggcttattcctagcctgtacaggagccatctctggagcctgaggtgagcacagatctaagaaggactgaccagcaccccaggaagcctgggggtgggggaagagacaacccggtgctaaaaccccagtcctccctcccggagacagcagcaggcaggtctctcagtctgttcatctgcttgtctgattatagccttgctgagaaggttgggttcagcagagtctgtgatctcattttgggttcattttcccttccttattaagatcctaatttttaaacatagcctgcaaacagcaatagcaacaaagaacaacatcacattggaagccaccttgaaacatctggaaacctgaggtcttgccatgggttttacatcctgcaaatgccccgctgtgtgagagcacaggtttgaatctgctttttaaactatgaactgtaatgacttaagtgccagtcaactcttaatgatagagcaagttctgattggactcacgtccgatgtcatctcttgaaccacagtaatgaaacaggatgtactccacgagatgtttcaatatgttctcagtccaaattctacatctttcaattaaaaaatgcatcaccattgcattatataccacagatcattaaatacctatcactgtccatatccaagtctcccagtggaagagatggctgacatttagctaggaacttttaaaacacttgagaataaattatgacccaaacttactgttcttaatgacacgtataaagttcagctcttaaataaaaggattcaggaatacagaaacaaagtccccagccgtactaaggaaataaaagtcgtccagttcttgtttccactaaattgtacatttttattataattggtataaagtgaaactcttaaaaaaacacgtaggaatttaaaataaagtagaatatcctattttcagggtcaccagtaccatggtgagatttgtctcttaaacaatgacacttagtagctctgtagttccatgaatacttttgaagtgtcatattaaaaccaatctcatggccttgaggcaaagagaagcaattagtcttggagttgtgaataaataaaaatccatttatacacccgtccttgacatgtaccttgcaaatcttagaaacttcatctagtgggaaaataaatgttaaatcatgaatacccatactaatcacattgccatgtggcttcctaaaacagtttcgcttataccaatctttcaagtattaatttatatgtatatattcacccagattgaacacgaaacaaaggcgttaccgcagccacctaggatgagggacaaaagaggtgtgaggggcgctgggggccacaggagccatgacaagcggattttcagtgagtccctcatcctccaacacaagcctgctccaccttccctcattccaccctccacaaaggcctggggcgggggaggacgtttctgtccatgaagttgggggcacccacacacacaacctcgtccgattgtgattctagccagcatttaagggtggatacaggagatcaaagtatttgaatacttgcttcactttctatttgtgtctggtccctcaatgctgagtgggatgtgcattgatggagggctttgctgttcctatgtcgtgcttgggacagtcggccacaaagctgggctgacctctcgggccgggccgggcctggccagcgtgccgaacgcgcagagagcgcgctgctgagccgaagctgggagctggaagcccggaggtaccggggcgtagggagcagagtgggcagcccttgggcctcgcgggagcccctcccaacccctgcacagatccctgacctacttccagggcttctttctgttccaggagcagctcaaaatccataaattaaggaaattaactgatggggcctgcggcatctttgtaagctatttaaatctataaatttacaacatcttctgcatatatcaaataattgaactaactgcagggatgtaactttaatgagaaaatttccccctttttcctgtagttcgaactcgaaaataaataaataaataaaaccttcccttaggaggaaagtttcggctgattcccgcgtaaagaagttacggaagcgctgtctggacgctctctccacgcgcgcgaggtcctctagtagagggagaaagccccccccacttcaccttcctcccactggcaccccgagtccccctcaccccagctccaggccgaccccgagcgccccccaccccgggagtgcggccgctagggggcgtccaggcccggccggagccggcggtcgggacccaggcgccgttccggcccgtgcgcacccgccccgcggtcccagccggtctccggcccgggcgtccctggagccaggcgggggcgcagtgccggccagtcgcgcgctccgtttcctaggagccgggaaatggtcgccgaggaggaggaggaggcacgggcggggcgcaaaggaaacaggaggaagaggaaggggaggaggagtgggagtgggagaaaaggaggaaggggcggccgaagcggagactggggaggggcgtccggggcgcggacctcggccgcggggagtcttggctgccgccgtctccatcgcgccgcgcgcgtaaaggaaatggcgcgtctagccgcgagcggtcggcccggtgccccagcgcgtccctcccccgcggcggccgaccgcgtgtccgcagacgtcacgggagaggggcagcggggcagagaccctgggagggcggccagggagcgggggaggggcggcctggcccccggctccgctccagccccgaccgactggcagcccagtttcttcccaagtcccgcccccagccccgggcgccgcggcggcggctgctctcctctttgtaaccgaggagtcaagaaatgtgagaaacgtgccctgtgttacttatttgggagccgaaaatttatgcccagctgaaagcgcccggggaaatattacatcagatgaaatgacaatgattaaaatcagcctctcccccgccccctccccgagcccggaggaggcccgggcgccgcgtggccggccggcggggggcggggggctgggccgcggagggcgctggggcctgggcgcaccgctcccgggagggtcctggccgcggccccggcgggaaggcgcgggcttcgggagaggcgggtggggatcgcccggcgaaaggaggggaaacggcgcgtttttgtcgccaggcgcgggcgcgcggagctaattgcgactctaatcctctgccccgcggcgcagccgagccccgagccaggagtcgccgcgcgcgcccgttcgcgctgggtaatttggggccggatcgctgccctttacgtccgggctgggccgcggcgaggcgctggctaggggctggagtggggggctggttttctctccagcaatcgagggaggccgccggagagagaggagggaggagaggaggtgggagcggcgggagggcagccggagagcggcgcgaggaggaggcggcggcggcggaggcggcggccgcgaagaggggaggaggcgaggggagggtggggaggggaggccccggcgcgccgcgccgcgaggggccgcgtgaagcgggggccggggcgggaggggtgggtggggggagggttgggggcgagagagaaagtaactccaggacgagaccggagcgacccgcgcagcgagcataggcggcgaagctgcgcccggcgcccgagaccggcagctgcgtggggcgggggctgcgcccgagcccgatctgccggctccgaggtaagctcagcgcgggcggccaccgctcagagccgcgcaaccctgccccgaagtggctgcgataccgagaaagtcgcccggccagggtctggacctgggcgggggcggccgctttgtccctctgctgggcggcgggggctggcggcgcgggggtgcccagcacaaaggcctggtgcaagagtggggttgcccacgtgggctggtcctggccgcgggtggaccctccccacgcgggcggtctcggagcttcctgccgcgcggtgtgtgtgtgtgtgtgtgtgtgtgtgtgtgtgtgtgcgcgcgcgcgcgcgcgcgcttgtggaggtccccgcactctggcccctgttctgggccgagcgccctgcagagctggcgagtttccggggtcagaaacgggctcacgcaactggggcttcgggatgcacaagtcccggcttggcgcccaaaatcagagaaagtctccagtgggacagatgtgcgtcctctgacgcccaccccacgagtccgaaacctggcaggaggggctgtcgcgctggtggtggtcccgggcgcgcagggtttggggctgggagaggggccgcgatgggagggatcgccgcctgcagatccggttccccgctgcccgcccgcaccccctgacctggacgcgcgcacccggcacacactcgcaaacacacccgggggcggacccccgcctctgcagcgcctttctgtcttccggcggcccccacccgcgactgcagaaagataagcttcaagttttcgctccgtatctcaaatgtgcatgaaggaatttaactgcacgagtgaataacagcattagtttcaattaatttttttttaatcccggcaacaataaactttgagaacaaaagcgcttttacgtccttaattaggcgagcttcccatctgtggtctccaagtgtctgcctcttgatttaactttgtccccgccccgcctccgcggcaacccctcccagcccagccccgcgcttcgggtgccgcggccaccccgccccgcggcgcctccagccttggcccaagccctctcccgtcgcccctaagttcacaccggccggctggctccgcggcggaggcgggagggggggggtggggaggctggcgcgcaccaggtggcccgcctgcctctccggggccacccctgggacaattgtgcaggcccccaggactttcgccccgggccagcgccctgagtgcggagccgaggggagctcgagaggcgccttctgtttaccttttatggttaaaataacagcttagcaaagaagcgacttcagaagaagcgatttagtgaaatcgtctcaagctgccgcagctcagccagtttaatcacccccagagagccgaacaactgcgagcgcaatgggacacaaaatcattttgtgtgtaaatgagcgtggcattctgctcacttctctctgctcgggcgggcggggctcggcggcgggcgggcagggacccgggtctcccgccgcagctggagaagcgggtcactaccgggccagtttggaaacctgtgggccctcccgaccgctatcgctgaggcccctgcaacaggcgggccagggcgcactggggctgggtgctgggtttgatgctggtgctggtggaatgaacttgtatctctcactgcacccacttttgtgcttctgacttaagcagtggtctcggaaagagggtcgtggtcccgcacggatgcgcttgttgggagaaaccttggagattcacggcaaggcgtaaagcctggggcttccaacggtaagtttctggcttgccatgaacatcaggttgttcttgggagggaaaaggggctaagaacagagtggagcggcttctgtgatggaggcttggtgttcacgtcactttggaatagtgtcctggtattggggaaaacatcttgcagtccgctttgatagaatttcagccagaattccttcctgttcagtttatcctcagcgcgtcttcccttctgactcctcccccagcagagcctcctagggcaggataatccattcctgaggtctgttttggttctcagaactccttgagctaagtgacctggttttgtttttttaagcttgtagaactcaggaatgccaaaagcagtggattctgagtccacaggccccagtgagggtatatattaaacatcactgtctgcccattgcaacctcccaccccagttttatgtcaggaaacttgcccgggcactcagggagagcaaccttgcttacatttgcaggatttgattctggttggattaaaattggatattgaatttcaaggcacaaattttgatcccagagttttaatgggaaaaagcaatcccatgggtcccaagaatttcaagtggtttctctcttaaaggttaaaccttcgagagacgtccagggtaggtttgtggaagccagtgtctgtggatgtgtgaaggggggtgactattcacgtgcaaatctcctctttcctcccttttgagacagctgtaaatcagtgaacggggctgcagaattctgcccctcctgcatagggcctgcaaagcgcccctgggtgtggcttccagggactgagggacaatcttatttcaggtgactacggcacagaggagagttactgagtgcctctggggaggagcagtagaaagggtccattggctgatctgcttgctctgtgcttcctcctggccacctggccatctcctgatgcctcgggggtatgtgatcctgaggggtctggaatgcattaggcatagacaacaccactctgggagtctggggagaaactgtgaggtacagactaggcaaacaaagacaggttttctctgctattgggagccacagagaagaggcggcttcccaagtgacttgccctcatccatgtgcctggacttctgctgaacggcttccctgtgtctggccagatgcaagctgtatcttatcaccatggggatggtattaagagaggtcctaggttccctggcccatggagggtgaggggtgctttctgagccttggtccacaaggctgttgcaagaggagacacgcttggtaacatggcttgaaaggaaaataccaggaaaatctggtttgttctgaaatattttggggcaataatggtgagcatatgtttcagtgctgtcattagccgaattagcagacatggagctgcccagaaaacacatgtgtgagtgtgactgtgtgtgtgtgcatgtatgtgtgtgtcatctgctacagcctggaggcctgctttggggtgtggagacagatagagagatagtggcggtggagtcaatcagggagggctgcatggacctcgcagggtctcagagagcatgcagaaaggacaattctaagtgtctttgaccccatggtacatgactaggaggaataagccttctctggttttgtcgatgcctcccgcagatactctgggcagggatggaagcctagatgcctcaccgcaaggagcggccgagcgggtcctcgcttcacacacacggcagcaccggcaccgcggtgagcctgcagggtgggctgggtccctgccgggagttccctctttcccttcttccccagtgcctgtttactggctgtccttccttgggaccatgacactccaggtggctgttgactggctgtaggattatgtatttttgaaacaaaaatgctcttaatttgatgtgaaatttactacatgtataaaactcaacgccttaggtgctgaggaagtcactaatttagaggtgtctcgttactgagacaaacttgcaaaaaacccctgaatcccaattcacaaattggtgattcgtttgtcaggggatatttcacatctaacacataagcccacgacctttaattagaattttgcagtttgttttatgcccctggaggctgacaccttgaaaaattttttttcttgatttcttattgctaataagcatctttctttttccctctggtactttgaagaaaatgatgcaaatacacttaattacagtggtggccataatttgtcagctgaatatatgatcaggcacgggcagaagtgatctgattagatctgtgatcacactctcaataaagggagtgcatggctgtgttgtggagaaactcttgtgttccgctttgaaactcttgtgttccgctttgtttccatctctaggagggaggaaacatgtcccggctgtctctcacccggtcgcctgtgtctcccctggctgcccagggcatccccctgccagcccagctcaccaagtccaatgcacctgtgcacatcgatgtgggcggccacatgtacaccagcagcctggccacgctcaccaagtaccctgactccaggtaagagtaagccccttgaaacatcaggcatgtgtgggtcagggcagcatctgtaatctgctgcctagggggtggggtctctccccactgtcactccacccaccagggtctccagggtgcacaagctgacacagcctgagggagctagggttggggagtccaagtctgcctgttgaaagctgctatgcacagaggcttgtgaccctgacttggcggcattggtagtgcaaggtggagctcctgacccacctgcaggggactagggcttattcagagccagcccagcctgagcctgccggcagcgggcaggggagtctcacgtaccttcaaggttcctctggagggagacttaggcccggcccctgcagggggtcatttgtgagtgatactgagtaggtaagtcttgggggcatgggggtgggtatttaatcctattttctattccacccctgggaaattcacaaggggagggaagaggagctgtggtgagctgcagtgtgccatctttgtcattttccgtggccactgctgggccctagaggctagcagcaggcttcccttggagctggtgctgcagtgactagctaggaatgaatcacatacctcatcagtggataaagggtctctggccaggaccctggttgggggctcacaggcaccctccatgctgctgaacttataggctgcccaggcccttgggcctgcgagaggtttggggtgctgggtgctgccagctctcctgctcttccttgcagggtgtttctctcctgggtgagggacctgctttccccgttggcacggcagcagggctgacccgagtagggtgggtcttgagcagcttgctcagccgaggatgtttgctcctggcacagagaggcggtcatcgctcccctggggctgctgaaggctgagcgtgggagggccaaggctgtgggcatcacccctgtgttatgcatttgaaataacaggaggagttaattaatcccccagatactgagggatcatctctggggagcatacacggcaggctgcattgtcaccggtgtggttcctcagagcagggaggatggtagtgcgcagaggtggctttccaagcctgttggggctgcaggggagcctgtgcaggtgcaggcatggtcccttgaggaggaaaaactggaaatgggtgcagtgtctagttccaaatttggagagtctagggtacagatggtgactggtgttccagtaccccaggtggacagagactcagcctggggccctgtggccttggggcttgtggggtggggacaagagccacggggccaggtcagcagtgttggcctgtgtgctcactcacagagccctgtctaggatgggagatagattctgcttatttaatttccattttgccttctgcggcatttctgagttgtttgagatagatcatcccttaatcggttgacgacgtttgtgagtgaaattcataaaacctttgcccacaaccctctctgaagagtttcctgaaatcagagagttgcctgtctggagtaatcacagcccaggccctgggggaggcgggtgggagaggcttctcattctgggctcttggctgctgcctgagagcaggagggcagggggccatctccccccacccagccccactgtgctgctcacccattgctttgttctgctgtgggatgtgctctcatggggagctagggcccctgtggccctgtgatctggcacttgggaccctcctggtgtgcccaaggggtggcagtctatgtttattcttccccagggctggggctcaaggtgaatctgttgttctgcctggatggcctctggctgctgtgggggtgctctgtaggcctgaagctttggactagaggccagggatggctgacctgcaggacaatcaggggacaggaggccagggggcctgagaagtgggtcaggcagctgtgctggcaagagcccctcagatctctcttgtccttcctgtagtggattattataatataagcagttttctaccaattctggaaaaaatcaatctcacctagtgtcactgatctaggagacacctggagatggaggactaagagtgctgtggtcctcagggggtttctggatggtgaagatgacctgccctaggcagcattgtaaaagctgggacctctaccctcggctcccctgagaactctgcctgagcctctgggtctcggcggttggggtggcctgggtgctggagagtctcgtgctgggtgactcctctggtctgcctaggagcagtcactggtcctcacccgagacagccaagcacagccggggctgggagtggattccctgggccggcccccttgctggtgtcctgcctgcttgacccccgttagctgccgccatcacagccacactctgacatccatcctgactatgggaagcatcaaatgaagatggccaggagcttcagaactcttaaaacctggtgcctgaaacagccaggaaattggagccagagcttaaaaaaaaaaaggaaataaacgagaagacgaaggccatcctgatgctcccccttgtgcacacagggcaggtggttggaggcatcttttctgcccctgagggtcccacctgctgcagcgtgaactggccacctcattccatggaggacttcggaagccggcccctcaaaccctgcatcctctctcagagggtggcctgggccattttccacagggaacgtggagcccctgacagagctgggaactcatacctgcagggctgagaatggctgagggctcctccatggtgattatcctcacctttcctcaacctgctcacgtccttggcagcctcagacgctgagggcatgaaaggcctctgtcctgggagaggcggtacagctgccgcttgatccaggagcctatactgaaccatggaaagatctagaatcagcctgtcctgaaataaggcagatggaaaaccttctaaacttggaccgatgagacaacctagaacccatccagccctggaatgtgggtgcatcaggagtcttctagaccaacaggaccagctagagcctcagccagacctgacgtcagaagggttgggaactcagccaggcctagaatgctgcctgcttacatggactttggagctccactgggaagggtggggagagttcccaggaggctgagggtttggatctgctgactcaccttggatgtagctcttacttcccaccggtgccacacatggacctcagccacctgccaaccactgcccatggtatctggcagcctgggacagacccatctgtctccaggaatgctgggtggccctcactctgacatctggatgcccacgctctactaggccaggtcctagggcctttgtaactggagccagccgtggaacccacagcctttccagcaggggctgtgacctgcagtgccattgtcaccaggcctagggggttgacagggctcatcggcctttggagctctgagatgagttgtatctgggtggctgcagctctgggtccacagactcgggctcacagcagactctgacctccccatgcccatccacgagacagccttgcccttttctttctttcttttaagcgacagcgtttgtctttcttggccaggctggagtacgtggtgtgatctcggctcattgcaacctcaaacgcatggactcaagtgatcctcccacctcagcctcccaagtggactacaagtgcatgccaccatacccagctaatttttaaattttttgtagagatggggtcttgctgcgttgcctaggctggtctcgaacccctggcctcaagcagtcctccaccttagcttcccaaagtgctgggattacaggtgtgagccacggtgcccagctaaaccgtgccctttatactaccctgctaggagagaaacctgcaccgtgttcccagagactccatacccgggcagaccatcatggctgatgcattgagtgtgctgggccatcagagcataggatggtgtggacgggaggccctgagggcagacttgggggctctgactccctcagctcctgcccagctagtgtgtcctgggtgcaagtggcagtggggcagggccctggagacggctgacttggagtggacagaggagtgggctgctgttagaacagggggcatccctgcaggggtccctgctggtgcaggcagagagtgaggggcttaggctccagattgtgtgcaggccgggctgggaagcctaggtcccaagttggagctactgttctcccagctgtgcagagaagctgccaccttggcagggtccagctgggcaggagtgtggccctgcctgctgaaggatgtggtggtgctgcccttggggaaatgatgccaacttccctcctgttcccaaaccaagcccttggctactcccacccctctttagggttcctagttatccctagctcgacctggggtctgccagggcagttgccaaaccagagctggccaccctgggcactggggaggtggtatcagccctggctctgaggcctggctccttctccccggagtggacagggacaggcatcaggggctccccaagacccttctcctggtcttgcatttgttagaaccattgcccttcagaggacagggtaccggcacctgccttctctccagtccccatccgccaccactaggtgtggtgtgcatacgctctggcatgtgtgcacatatgtatgcactgtggtgcatgtgtgtgcatggtttctgtgtgcgtgtgtgtatgcctgtgttgtggcatgtgtgcaagggccctgttgcatgtgtgtgctgtggcacacttgccatccctcctgtctgcctctgtttctccctgtgggctccctgagtgagcggcagtaggggatttgtgccgtcatgtctctgggtgcctggtgttgacaggtgtgtgtcctttcctggatgtgtctggatctgcatgatatgtgtgtgttgggaaggaagggaccatgtgaccctgtgcctgttgcacaggcctgtgtgtctcacactcgtttacatgggttgggtggggaggatgtatgtcctggctcgtttactgggtgtgtggctgttggccggggtgttggatggttcatgtgcattttctgggtgggtctatctggcaagggtgtgtgcaccaggcctgtgaccagctggtttgtgtgtagggggtaaggtgcctgtgtcttgctatacctttccaggcctgtaacataacgtgtgttggcaggctggtgtgtacagctgggtgtgtccctctctggctgtgacttgcgggtgtaggcaggatgtgtggtgtgtcctgttaactgtagcctggctgccccaggtgtgtgcagatgttgtcaggcctggaacagttccagagtcacccatgtcaggtccctcgcccctccagccgtgtgggccctcaggagtgggggcggggtgtgggaagacaggcagacttgtccccatcccttcagacatcccacctcgcctgtctctcccaggataagccgcctcttcaatggcactgaacccatcgtcctggacagtttgaagcaacattatttcattgaccgggatggggagattttccgctacgtcctgagcttcctgcggacgtccaagctgctgcttccggatgactttaaggtaagtccatggctggtggcccccctgcactgcctgtgtgatggcattacacaggggacgctgtgacttaataagtggacccctggttgtcatggtaaccataaaaagttaaacgatgaagccgagggctaaatcagtttttctaaactaattttgttttctcacatttttagcttatttatcagggtatataacaacaatcaagctgcagaacgtatcccagctgaacatttgtcgtgtttaaggatgggcgcgtgccagcgttatagtagttagaggttcataaatctgttccatcggctgggtgcagtggttcatgcctgtaatcccagcactttgggaggccaaggtgggtggatcacttgaggtcaggagttcaagaccaacttggccaacttgatgaaaccccatctctactgaaaatgcaaaaattaggcctggagcggtggctcacgcctgtaatcccagcactttgggaggccgaggcgggtggatcaccaggtcaggagtttgagaccagcctggccaagatggtgaaacaccgtctctgctaaaaatagaaaaattagccaggcgtggtggcaggcctgtaatcccagctactcgggaggctgagacaggagaaccacttgaacccaggaggcagaggttacagtgggccgagattgcgccactgcactctagcctgggcgacagagcaagactccgtctcaaaaaagagaaagaaaaggacggctgtaattagacttcaaaaaataaagtataaaaagaaaaatgcaaaaattagccgggcatggtgacaggtgcctgtaataccagccacttgggaagctgaggcaggagaatctcttgaacccaggaggtggaggcggaggttgcagtgagccgagatcacgtcactgcactccagcctggatgacggagcaagactctgtctcaaaaaaaaaaaaaaatctgttctgtgttgggcaatttgcagggagaaaagccctgatgaccaaacagataccctttaaacaaaaggttaacccccaggtctccgggtgagcccgtcagggcaggtgacctggttccctgggtcatgcctcagtgctgagcccctcccacatgtcagggactctgggaggaaggaaactcaggcctggggtacactggcatgtattaatactagcaaatgtctgtccttccttccttcattccttcctctatccagaggaccagtagccctggggccttgtctttcatccagctcagttactgagtgccagcctctgaattcaggctgaaaacagtgaaacacacacactaggacctgccccacaacacttaacagtctagcgggcagacagatactgaacttgaagtccatgtgacctgggctgggcgggtttgaaagaaatgatgttcatctgggtggtgaaggcagaacggggccaaacaggtgtgagggccttggtgcaggggatgggggtggcagatggcttgatgcattccagaactggaaagaaggtgtcaagcctggagctttatggactgggaggggaaggtcaggaaaggaggctgctgtttgatgtcaggaccttggtgggtggcccagtgcctggcatttaactctgaatgcagtggaaggggtgtgtgcaggggaagggcagtcagatctgcaaattgggaagatctctctggctgttgggtggggaagaaggcagagaggggtgggggtgggtgcagtgaggcaattatggatgaggccccttccccaggccaagggaggctgggtggaggctttggatggaccaggatggagatagagaagatggagcaaggtggcacatcagacttctgtttagtacaggcacagtggctcacttggtcatcccagcactttgggaggccgaatggggaggatcctttgaggcctggagttcaagaccagcctggacaacatagcaagatgctgtctatacaaatttgttttttaattaaaaaaggccgggtgcggtggctcacacctgtaattctagcgctttgggaggccgatttaggtggatcacctgaggtcaggagttcgagaccagcctgaccaatatggtgaaaccccatctctcttaaaaatacaaaaatgagccgggcgtggtggtgtgcacctgtagtcccagctactcgggagactgagacaggagaattgcttgaacccaggaggtggatgttgcagtgagctgaggtcacaccactgcactccagcctgggcaacagagcaaggtttcataagtaaataaataaactttacttttaaagttttttaagagtaatttatttacttttcataagtaaataaataaacaagcaagcaagctgcaaaagcacgtggctgtggtagtgtaaagggcctcttgcaggtgccccgggacttgtggcttgaattctgagttggtaagttgaggcccggggtggaccaggctgtgggagtggggtttctgcccctgcatgggagagctggtggggcatcagatggagaaatcctgggccatgacaaaagatggggttgtctgtcatgcagttgtcatttaaaatctcaggagaatggccaggagaggtggctcacacctgtaatcccagtgctttgggaggccaagcaggaggatcatttgatcccaggaattccagaccagcctggaccttgtgtctacaaataattattattgttattattattattatcctggcatgatggctcatgcctgtagtctcagctgctcgggaggctgagtcaggaggatcccttgagcctgggagttcaaggctgcagtgagctatgatcacatcactgcactccagtctgggctacagaatgagaccctgtctaaagaaaataaaataaaaatctcaggagcaagtgagagtggagagagcagaggcccaggatagagccctgaggagcccttgcatggggcaggagaggcaggatgggccactgacccatgacaggcccagaggtcagggttagaatctaggcctccctccaggcggccagcaggtggaagggacttagggcctgtaggtcagggggctgggcttccttgcctcttcctcaggcatgagtcatggggacctatgggaccttggccattcccagtggggtgggtgtgtgtgagcgtgtatagtgtgcatatgtggcccagggcatggggccagtatcagcgcctgagggacagtctgtgcgaggctgcttagcccagaagggggctgcgtggcagggggcgggcttcccctccctggacactttatcacactctgcctgtttgggcaggggctggaccaggcacttggcacatcttgcatcctttgatcctcactttcattctctgagctggttgtttatgtccattttatacataagggaactgaggccgggcgcagtggctcacgccttgggaggccgaggcaggtggatcacatgagggcaggagttcaagaccagcctggccaacatgggaaaaccccatctctactaaaaacataaaagttagccgggtgtggtggcaggcacctgtagtcccagctactcgggaggctgaggcacgagaattgtggagtttgctgtgagccaaaatcgagccactgcactccagcctgggtgacagagagagtctgtctcaaaaaacaaaaacaaaaaaaaaaaacaaaaaaaaacgaaaaaaaaaccaagaggctcagttagtgaggtatagaggtttagaggtctcagggcaggttgatgatgaagctgaaaatctgacccaggcaggcttggctggagaagaactttttttgcttccgggtaggctgtgagctcctaggcccggctgccctgtgcccagcatgatctcttctctcggtgggattctaaggcagcagcaggtccccaggcataggcacagcctcgtcctttagtggagcttccaggtctttccatggggaggcttcactgcccagtgcctggggccagatggaagggctcaggggggctggcacaggtgcacatcagcggctgcccttgggacaaggctaggttctttatacttgcaaaccactcagttgccccatctgtacaatgggtgcaaccggcccagtccacacaataccctgcgagtcgcagttcctgcagaattggttggaaccggcaggccgcctcccctctcccccttcccccaccacccctactccgacacccacatcaacaccctgtgcgcctgtccccaggacttcagtctgctgtacgaggaggcgcgctactatcagctccagcccatggtgcgcgagctggagcgctggcagcaggagcaggagcagcggcgccgcagccgggcctgtgactgcctggtggtgcgcgtcacgcccgacttgggcgagcggatcgcactcagcggcgagaaggccctcatcgaggaggtcttccccgagaccggagacgtcatgtgcaactccgtcaacgccggctggaaccaggaccccacgcacgtcatccgcttcccgctcaatggctactgccggctcaactcggtacaggtgagggctgcacgctgccccctccccgccgcacccccggcgtccgcggagccctccaggggcagagtgagctggagggaggcgcgatccctgaaacggtgaagccccccgtgccatcctacaaaaaaggcaacaatgtgtcgatgcataatttatgtccctctcataattaaatgatggcgcctgggggatggacttaaaaaaatcgatctgtactttttttttttttttccaaaaggatgttctataaaaatggcccagagtattttcaacaaagcgtgcttcatttgacacccagagtctgactttggattcgaactaaacccaggcaacaggcgaggcaggacagaggctgagtggaaaggtggtctggagccccttccctctccctgctgacctgggagtcgcaggcacccaccagctgccaagagaatccctggaccggctcttcctggatgggtccaagaattggacagctcagatggagtgagggcctattttccaacagctcttcgcagacccaagagcttggcacatttccgggttagggtggaatgggctttgcagggaagagggccccctgtgcacgcattccacagcctgtcggtcagaacttgctagttgcaggagacgggtgttacacgcagtcatcagacctcaccctcacagaggcacaaacccacatagttgtggacgcctgcagagactcaaatattgagaggacttctcctttttctctccctccagagctcccacgagctgatgcacccccaggcttcaaaccacctggaatgcacagctcagggaagctggtggatgcctagaggctgaaggacagggaactctccattattggggcaggactcagggaggacacttggggccatgtgtctggagagagggcataggttacaccctacagaataaagaagggacccaaagcctctttttgcctcccggaatcaaggccctgagggcagcaggatggtggcctgggtggggtcgtccaactaggtttgctaacctgaggggtcactgggcctggccacttctgtccctctggtggtggaacccagcacgtggttctgtagggacctttgtcagtgagcaagactgagatcgtcacaggagaaggtgcccttgctggctgccccagcaggcacccacctccctgccaggccaagccaggtgtcctcttgcagcttggccttgatgacctctgtttcttcctgggcaggtcctggagcggctgttccagaggggtttcagcgtggctgcgtcctgtgggggcggtgtggactcctcccagttcagcgagtatgtgctttgccgggaggagcggcggccgcagcccacccccactgctgttcgaatcaagcaggaacccctggactaggccctgcttcagtgcccacctgggcccccccagggacctggaaacagtgctggggagttctgcctgtgtatacttggccgtgggcatgagaccgagggtgaggctggagggtccaaagctggcccagcgagcaccagggtcccaggtgtcatggcaacagaacgtgggatgctggaggcatgcctgcagaaggactgttgatgcgacccaaagatacagcggtgggatctctgctgccagctctcccagcccctcagcttcgcagcctggcgcagcatcctctgaggccccggggcctgttggggcggggttggaagagccgtctgcagctacttcagaggagctgtttatccctctccacgcggggcagactctggcgggtctcctagcgtccgagagatggcttattttctacagtatttaaaatggatgcagccctaactgcaaaagtcagagaggctgacaaggaccaatgcttctttatctggtgctcagttctcagtcagacgtgcagcatggctgcagggtggaccagctgcctggcattcaggcccagatgcctgcagggctggggctctcgggacagatgcagggatgtgtgctgcagggctgctgggaggagagtggtgggggcctgagggctgagtgattctgtaaccacctgagaccttcacgtttgctgccgttgggggctcaggctgcactccccgggtcacctgacctgctgcccaggggcttccagtcctgtctgtgtggactggcacctgggctgctggagaagtctcctcccgttcggaccagcctcagggctgcacgttacctcaggaatgggccccaccatgaaggggcccatctgtcagcagcgtcttctaggtccccagctcagggagccatccccagctccagttttctcatgcgaatatgcacagttttaattcacgttgttacactagcctgccgatgagacccagacacaggcagacctggcgctcttgacccctgattccagtgaggactggccctgaggagtccttgcagacctgctgcctcccccacgacaggcccaaagatggaccccccctggccttgtgacagctccccaagtgttctccggtggagaaactgcagaggactggtgggcggggctccccagccatcaccatcctgtgtacaatggctgtagacttgtatatggctcctttaatattgtaaagatgctgatgtacaattgtcgtgcatttgtgtgaacacattgcgttcccagtccatgccataaatgatgctctcaagcaaaagactggaggctctgtcctgtgcagaagcagcagccagactcccgcattcgatgttgtgcagggaggtttgggggcggaacggattcctcccttggatccttcagttcccatcgaggaataacccgcagcagtggtggaggaaggtcagtggctgggtcctgagcttggtgttatttattgcatttgggtgcctgtcccctcagggcagcacagattctgaattctgattcacagtccctagccagatgggaactgggaaagagacagaaggcgtctgggtgcttttgaaccctgtctcaaatgtttgggattttctctctcactattctttggttggggatgatgtcctctttagacccccacgtaatggtatgagaaggtggcaggcagtggctcagccagccagggggcaccaagtcatgcagccagcgtgagacctgcagttcacctaagcacagaacgagatctcagtatgcctccatgtaaacagattcacataggcctccaatttcaatgagaccttttgcattttttctcaaagcccttatgttctaacccatgagaaccattttacctgccctctaagggccaccagcttcgacctgcctcaggggacagcagcacagaccagtggctccctgtccaaggccgcagagcagacgccatcccactgtacaatcgaatttgctggacaaacttgataggtttctctgcttagcaacgagcctatagttagttggcacatctgcgttttggcatctgaggctcccatctgagtggaggagaaagtgttgtgtttattagcaggaagtcttgtgaaaacagctcgctgctgtgtatgtttatggatttttctgatataacagccagcatggttaccgagtggtagagattctcgaacattctcaaactctctttttgggtaaatgattgtgctaaaaataaaatttattaataaagaaggggaaaaaggagtaactctacctgactaaatgttactctaatttatttatttctttactaattaagtaaaaccaggaagtatgattttacatcaaccagagaatttctgaatttatagggaaacactatgtccccataatgatgctataattctaatatatctagtccccataaacagtaagtacaaattatcattcctttaaagcatttttacacttcctggaatgagtatattatcagcaatcttttgtcaaatgccagccgtataaatgttacttctgctctttgtaaacctcaaaactcattattcttgattataagcaactggacagaaccatgccaaagcttccccgtttcccaccaaacccctgccagtgagtgcagagaactcgcaaagccacagcaggcggtctcagccaccgtcccgctcacaggggcccaatgccaggtcacaacactaagaatatctttcaaaaaatgtgtcttttttttttttttttttaaagctactgcttgactgttccttagaataaataaaggatattttataaattacagctctagcccttggtttgtaattcacggaagcagccacaatcaggtactccagcattggtcctcgggaaccaccactccccacacttgggacctggtgtggctactgagtaggaccttaacatcccaagtcccaaatcccaaagcttcctgatttgaggactgaccagagagcagcagcgttgtctctaggcgctcagtgcacatgctgttggcagatctggcggggaaaatggtgcaggcatggcctccctttacctctccagacccccaagcctggactcaagtgttcaggctgtgatgagcatgttgcactacgttggtgttgcatacatgtatatctgtggaccaaaccactaacattcaaaagaaggaaagtgggcgggtcacagtgactcatgcctgtaatcccaacactttgggaggctgaggcgggtggattgctccagcacaggagttcaaaacgagcctgggcaatttggtgagaccccatctctacaaaagaatttaaaaataagccactcatggtggcatgtgcctatagtcccagctactcaggaggctgaggtgggaggatcacttgagttcaggaggttgaggctgcagtgagccatgttcacaccactgcactccagcctagacaacagagcaagccccgtctcaaaataaataaaattaaaaagagaaagcatggctgggtgtggtggctcacacctgtaatgccagcactttggggccaaggtgggtggatcccctgaggtcatgagttcaagaccagcctggccaacatggcaaaaccccgtctctactaaaaatacaaaaaaaaaaggattagctgggtgtgctggcatgtgcctgtagtcccagctactcgggaggctggggcacgagaatcgcttgaacccgggaggcagaagtcgcagtgagccgagatcgcaccactgcactctagcctggcgacagagcgaggctccatcttaaaataaaaaaataattaattaaaaaaaaagggaagcacagatgtgagaaatggggaaactatatccattgagccactgaccaagataatatttaacttgactaagcctagcagagcctgcccacttcccctccctagaggccaacccatgttctcgaggcaatgctgtctgccaagatggccccatcccatcaagccctgccttccctcctgattctccagagacaggaaaatggctgcattggccctggaagatactcaatttctcctaagtagatgacaaggtggaaaatacaaaaatgggaaactgccaggggatattcagttggaggcaggaaatctgcctcagttcaaaacaatagggaggtctagacagagctagagggacaactgatggccagagaaggcagccgctggcctggatggagtctgacatctgggctgatgtagctgttgtaggaagtaggatgtcacaggttgatggccatctcaaggggggtaggcaatgtgtttagccacaaggctcaagtcagccaagtaatattggtcttgtcacatgtgtgatgagaatgtgggtggctctctttgctcaccccaaccccgcccaaaggaggagtttccttgtagagagagggcttgccctcacctggagatcaggggctggcagctgtcttatctctgatggaagatttgatgtggagttacctgcactgaagagtctgggtcactgtatagggtaaaagcccacatcgttaactgccacaaattttaaaattttctacaaatggatttgcttagaatgaatggtaagaaaagggtcaggtgcagtggcacacacctgtaatcccagcactttgggaggccaaggtgggtggatcattttaggtcaggagttcgagaccagcctggccaacatggtgaaaccctgtctctactaaaaatacaaaaattagccaggcatggcggtgcgtgcctgtagttccagctactcgggagcctgaggcaggagaatcgcttgaacctgggaggcagaggttgcagtgagccgaagtctcaccactgcactccagcctgggtgacagagtgagactccttctcaaaaacaggaaaaaaaaatggtaagaatagaaagatgatattaatgcatatgtgtcaaaagcagctcctgcctttattagtgagaagtttctcattagatcaaatgaagtttcttgtcagtatccagagaaacctacaaaggcatcacaaagataaagctctaacgtccaacataaagcccgagacaaaagatggtctagagcacctgcttggaggaaggtctatccaggaacaactgtatttaggttaaactgctaaattcaccaactagggcagagaggcacagaaacattccctccagaacccctttccattaagagttcactcctgtcaccacattctaggcagccccgatgttctctggaggaccggtgaggtaaggtaatgctttgtggactaacagaaagaaaaaagtgttggtgacagctaagggcagcttcctgccagcaccaagactagcgctgatgttctcttagaagcaccagagttttctaaggtgacccaaatggaacacaaccccagggaaggttgaaagtcagaaaagaagagcgcgtctctgctctttctggatctcacaaccagcgagttctcgcagccatggcctctgtaagcccagggacatttctctgtgagctttcattggaagggaaaccccagccccagagaagcctaccccgccacatcccaggctaatccctggatctggttcaggagctctcttcctgcaagccccaaagctagacaagcagagccctgccaggcccatggtgacctctgcagacctaggaactgcaggcagagttgggggctcgttcctggggaggggcccacccctgaggttgtgcatccaggaggggcccacccctgaggttgtgcatccaggcatgactgactgttggtagctgtttaccctcagggaaagagaactttctgtgtttttatctccacccccagtggaaggatatgttgagtagagtttttgctttttgaggaaaagtcatgatttggaaaggggcgctgatgtatctgttgaggctttggatgttgatttttaaagggtccctgcttccctgcaaagatccttatcttcacaaccacccaagagcaccacttattggtggccagcatatgccaagcactgcaggtgcttgggagggcaagatagctcatgaggcttggagcagacatttgtttatgcacaggaattgttcactttttttcttctcctttttttttttttttgtgagacagggtctcactccgttgcccaggctggagtgcagtggtgcagtcttggcttactgcaacctctgcctcctgggttcaagcgattcttgtgcctcagtctcccgagtagctgggattacaggtgtgcaccaccacgcccagctaattactgtatttttagtagaggcggggttttgctttgttggccaggctggtcttgaactcctggcctcaagtgatcctcccaccttggcctcccaaaatgctgggattacaggtgtgagccattgcgcccagccaggaattgtttactttcaattgtgtacttgaagctctgtaaatttaacaggaagagagaccacattgcagttttccacttcgtcatgacactgaacatggattaccccaaatgcattgatttgcatgtagagagaaccacctctcaggcctcaagactagcgtctccatagcaaaggaagcttctgtgaaattctaatgagagacccagagaaagaggcaggcacactcccggggacacacaaaggagaggggttaggggtcagctgcatttggggttttgtctttatttccattacacagaacagccagtcccgacagcgcccaggccccacaggacaatgctgttcctggacccggagccatggccgtggaataagagctaggtcttcagggcctcctcctaggatccttcttaacacagaaatcacaaaccaggccaaagtcttaaaaagcagagcctgggaggggcagggacgcccaagccacgctggggcccgggaggcctcccgtcctgcccgcgggagaacccaggccgcgcatccctggctggacggcgtcaccagccgtagctgggccaggcctgctgctcaaagcccgtgtctaggatgtcaccagagctcccttttctgtgtcctggacccggttcagggcccccgaggaagctgcggtttggggcgagccgattgcaccagcagggccgggctgctgctcccggggctgacgcgggccacgccctcctggacgcggacacacccccatttccccgggcccacagagccacgcctggccctgcagccaaacagcgggaaggcagattggtacgagtaggtacaaggccctggaattctcgcccggttgccacacactgcacggagcataattgggggaggttgtgcaactgcccgggaagccggggctcgcaacgagggctctctccaagtccccatcacaggcctccggggagcctcgggacagagcctgacgccaccttcgggtgacatcgatggcctcgctctggcagaggagtagtgtggctctgccgagaactggggagcccgggtccccgcagggccaaggggagggagggctggcggaaggggccgcgcccacagccccaggtggcagcagcggcggtggcggtcccgactggcagagcctaacgagaacagggcctatccccaggggccccgggctggacgcagaccagatctcgcgggggtgggctgggaggcgcccgccagaggccggaggctgacagtgcctttcctatcctatgggtctattgtgggcccgcggagcccccatgggtgggtccatccccgggcccagtgagtcacttccccaggccccggaggccttcgtggaaggtgcctccctttccggcaaagcatcctttgttctcctgctggctttgcttcccaatcctctctgagttgcaaccttgagggttttaggggcaccaagctcccaggagcacagaggtgggcttgggtgccacctggagagcgggctgcagaaggctgcagctgcttttttgcttcctcagttccctgccctctcaaggcccaggctctcccacctccccagacgtctggggaaacccacactgccctgcataggttgtggtgtgcagcctccggactgcagatcctgaacgcgcatcaggagggagggagggaggtttcgatgctctcgccctggccagcaccgctctgagttgctgaactggcctcaaggcttctcttgcatcagggagaggcttccggcaccaccactggcactcctccttctccctccctttagcctcccccagttcccatgcccaggtggaggaacccgtgtagaagcccagcccagggagggaattcatcaaagcaccttcccacacagcctctagtttgcctcctctccactcccaccttccagccccagcctggctagccacgtggggggctcctgtgccaaggagtgcccagctgccgggtgagtgagcagccctgcacagaaggcagctgactaccatacacactacatgtgtggagagcaccagccttgcagcctggcgaggctcttgctttgaagaaatagaagactaattattttatttatttatttatttatttatttatttatttatttatttatttttgagatggagtcttgctctgccacccaggctggagtgcattggtgtgatcttggctcactgcaacctccacctcccaggttcaagtgattctcctgcctcagcctcccgagtagctgggattacaggcgcccacaaccacgcctagttaatttttgtgtttttagtatatgtgctgctgaagtgagcatgaatttttgtgtttttagtacagatggggtttcaccatgttggacaggctggtcttgaactcctgacctcaagtgatctaccctccttggcttcccaaagtgctgagattacaggtgtgaaccacggcacccagccagaaaactaatttcaaaacaaaaacaaaagcacccctgtatgcacagattctcaaattgtatttactattggcaaagaaaggaagggggccccttagtgtcctaaaaccaggagagatgaaatcgattatggaacatcagttgatgaaatacatttatccttccacaaatatctactgagtgtctacaatcagcctggttactggaggccaggctctgagtcgtgagtgtcccatgaatcaccagctctccaaaccctgacatctaacaccacccacttcccaccctccccaggaagaaacaatatttaatagtttcatttacacagaaaaagaaggtgcaagctctctccctaaggaagagccaaaaagcagcctcaactggctccagagcctgtgctcctggattaagaacagagatcagtgtattggtttcctcttgtggctatgacaagttaccactaatgtggcttagaaaaatactatttttttttctttttctttttgtagagacaggtctccctatgatgcccaggctggtcttgaactcctggactcaagcgatcctcccaccttggcctctcaaagtgctgggataacaggtgtgagccaccatgcctagcccaacactgattttaagatgatatattttcatcttacagttccagatgtcagaagtctgacatgggtcacactgggctaaaatcaaggtgtcaacagagctgctctcctttctggagctctaggggagaatctttccttgtcctttccagcttctagaggctgccttcattctgtagcttgtggtcccttccttcatccccaaaaccagaagtgtagcatctttagatcccctcacccttgtttttctggactctagtgattccattgcccaccctccaccctgcagataatctccctattttaaggtctactaattcaccttaattccattggcaatcttaaacccctttgccacataacctaagatactcacagatcccaggtttaggatgtggacatatttggtggcattattctgcctgccacatctaggtagcaactttatctactcaaacaattgttattgaacacatgccctctttcaggcactaggatatagtagtgaatgaatacagaaaagccccaatcttgtggagcttacactccagtgaagagagatggacaagaaacaaaagtaaggctgggtgcggtgggtcacacctataatcccagcactttgagaggcccaggtgggaggatcgcttgagcccaggagtttgagaccagcctgggcaacatagggaaacctcatctctccaaaaaaaaaaaaaaaaaaaaaaaaatttgccaggtgtggtggcatgcacctgtggtctcagctaatccagaggctgaagtgagaggattgcttgaggctgttgaagctgcagtgagctatgatcacgccactgaactccagcctgggtgacagagcaagaccctgtctcaaaaaagaaaaacaaaaaataaacaacaaaaacccaataacaaaaataagtaaaatgtgtcataggttaaatagtgctaaaaataaagcaaggaaggggaataggagtgtgtgtgttgctattttggacagtatgctggacatctcccatttaccctgccccctgccctgggcctggaagctgacattgtgaacagtgtgaaggggctcccttaccctctggcttcctgttgggcatggctgatgggaagcatcttcaggagactggagggcagaaggcaagtcagcctctctcatcactcatctaaagacctcagccctgggccaggcccagtggcttattgcctgtaatcccagcactttgggaggccaaggtggaaggattgcttgagtccagaagttggagaccatcatgggcaatatagcaagaacctgtctctatttaaaaaaaaataaagaaatatttcttaacgggtatggtgacatatacctgtagtcccagctacttgggaggctgaggcaggaggatcccttgagcccaggagtttgatgctgcagtgagctatgatcatgccactgcatgcccactgcctgggcaacagagcgagaccctggttctaaaaaaaaaaaaaaaaaaaagaacataaaataaataaataacaaagacttcagcccctgccagaggcttttctcacacagcccacctggctctgagaatacctctccattctccccttccagcctagggatggtaactatggttggctatactacccctgagaggactcattacccctgatttctatataccctgccctcacctttgtaaatacaggttgagtatccctcatctggaaatgctcgggaccagaagtgttttggattttgctttttttaaattttggaatatttgtaaatttatatgtaatgagatttcttggggataggacccaagtctaaacacaaaatttatctcttttatatacatcttatacacacagctggaaggtaatcatatagaatagtctaaataattttgtgcatgaaacaaagtttgtgcacatggagcagcagaaagcaaaggtgtccctatctcagccatccgggtggacaatctgtggtgggttggcatcaccaacattcctttttttttcttttagaccaagtctcactctatcacccaggctggagtgcagtggtgccatcttggctcactgcagcctccacctcctgggttcaagcgattctcctgcctcagcctcccgagtagctgggattacaggcatgcgccaccacacccagctaatttttgtatttttagtacagacagggtttcaccatgttggccaggttggtcttgaactcctggcctcaagtgatctgcctgcctcagcgtcctaaagtgctgggattacaggcatgagccaccgtgcccggccattcctgactctgaatttatatgctatcaataagtaatccatttcttgcacctatttacacataagtacttaacagtaaaaaatttggtataccattcataaaatgaaaaaaataatgtatttagggtacctaagcagcatggtagcatcacaggaataccgcatcagtggttaaacagcagagaccaacaatggcaaagctttcagtctcttacctccgatgctgcgttttgattcaaaggttactatatttgcattcagcaggaatggggtaaagaaaaaaagatgaaatataaattaattttacaaaagtaaattttaaaaggttactatacattctatttttaaatctttattattattattgagactgagtttcgctcttgttgcccaagctggagtgcaacggcgcgattttggctcactgcaacctctgcctcctgggttcaagtgattctcctgcttcagcctccagagtagctgggattacaggcacgcaccaccatgcttggctaattattacacttttagtagagatggggtttcaccatgttggccaggctggtctcgaactcctgacttcaggtgatccacccacctcagcctcccaaagtgctgggattacagatgtgagccactgtgcccagccatatacatatgcatggtatatatatatatatgcatggtatatatatatatatatatatatatatgcatggtatatatataaatatatatatatatatatgcatggtatatatatatatgcatggtatatatataaatatatatatatatatgcatggtatatatatatatgcatggtatatatatatatatatatatatatatatatcatgcatatatatacacatacatacacatacaccatatatatgagtaatgtcttggccccacgtgagacattgtgaggaacctgccgttggtgcgtccagcctgaacacgtgctgttttattacgctttgtgggcgtgcttatgtggggatctgggtgagtgtggaaaagacatattgctgctgatgggagctgggaagtctttgattccttggagacagtgaataaactgtgtgttgtgtgctcatgttttagctccaaaccattacatgaagtcaactgtggaattttctacttgtgacatcagggtggcacccaaaaagtttcagattttgaagcattttggatttcagattttcagtttagggatgctcagccaatagtactttattaattggcgagtgctgtctgttttcaccaggaaggcctcgctgagccgcatgtaaaatttaaataaagccccaaagaaggtaaggcaggaggctgggcgggatggctcacgcctgtaatccggcactttgggaggccgaggtaagtaaatcacctgaggtcaggagttcaagaccagcctgaccaatatggtgaaaacctatctctactaaaaatacaaaaattagctgggcgtggtggcctgcgcctgtcgtcccagctacttaggaggctgagacaggagaattgcttgaacctgtgaggcagaggttgcagtgagccaagatggcaccactgcactccagcctgggcgacagagcgagagtccatcacaaaacaaaataaaataaaaatacaaaaattagccaggcatggtggcttgcacctgtagtcccagctgctcgggaggctgaggcaggagaatcatttgagccccggaggcagaggttgcagtgagccaagatggcgtcactgcactccagcctgggtgactgagcgagactccatccctgcccccggcaaaaaagaagaaggtaaggcgggagaaatgcagatttctggcagaagagcatttggggcaaaggggctgcaaggcaaaggcctcgaggtaggagtgtgcatgatgtgtctcagaaacgcaagaaggaggttatgtggctggagtgtgaggggctggggagttgcagaaggtgaggtcgcaggggtgcctggggtaggagggaagtcagatcatgtagggtctttgaaaaacgtgttgcctgtactccacccatttccccttagcacttgccttcaggtgcacacagaccctatggcttcctactgctcctgtagctctctgcctgagggtctttgttggtgaggagtgcaacagctcctcatgcgtggggcaggccaggaagtcaatgcccccttagctctctactattgtggagatggcaaataaacacccaggtgtcttgccttttgcgtctgacaatggggaggtctgctctaggctctctcaggggcctccagtggggttagagtgcaacggcatgatcttggctcactgcaacccctgcctcccaggtataaatgagtctcctgcctcagcctcccaagtagctgggattacaggcatgcgccaccatgtctggctaatttctgtatttttagtaaagatggggtttcaccatgttggccaggctggtcccaaactcctgacctcaggtgatccgtctgcctcggcctcccaaagtgctgggattagaggcgtgagctaccatgccctgcctcatttgttactttttaagggccagggtcttgctctgttgcccaggctggggtgcagtggtagatcatagcacactgtaaagctaaactcctggcctcaagcgatcctcccacctcagcttccctagcagctagaactgcaggcacatgccacaatgcctgggtaattttttatatttatttatttatttatttatttatttatttatttatttatttattgagacctagtcttgctctgttgcccaggctagaatacagtggcacgatctcagctcactgcaacctccacctcccgggttcaaacgattctcgtgtctcagcttctcaagtagctgggattacagatgtgcaccaccacacccggctaatttttgtatttttagtagagatggagttttgccatctctactcattgaccaggctcatctcaaactcctgacctcaagtgatctgtcagcctctgcctcccaaagtgctgggattacaggcatgagccattgtgcctggccaatttttatttttgcagaggtggaggtgcctttctatgttgcccaggctggtctcaaactcctggcctcaagtggtcctcccacttcagcctcccaaagcgctgggattacaggcatgagctgccgtgcccagacaagtagctcccttactagccttccctctcttggcttccttccttgccctgtcttacttccctctctctcttcctatataccaggaatcacctcccagtgaatgctgcgttcaaggtcttgtctcggcatcagcttctggagcatcccaatctaaaacactgccatgaaccgtgattgggacttgggcttctatttttatttttattttgagacggagtctcgctctgtctcccaggctggagtgcagtggcatgatctcggctcactgcaacctctgcctcccgggttcaactgattctcctgcctcagcctccccagtagctgggactacaggcacatgccagcatgcctggctaattacttgtatttttagtagagatggagtttcaccgtgttagccaggatggtctggaactcctggcctcccaaagcgctgggattacaggcgtgagccactgcgccaggccaggacttgggcttttcctgagcttgagagcagtggccactgcccagtggtgagcagaggagggaaatagactgaagggggctggggaggagcagggaaaccagttggatgcgaccatgatccttcagagcgagctgaaggtggcctggagcagggtgagagacgtgggagtagggagaggcagttccatcctgggtacacttggaaggaggagccaacataacttgatgcctgcttagatgtgaaatgtgggaggcagtgaggtgtctagggtggctacaagggggttggcctgagcaaaggaaggatggagttgccttttgctgggatgagaagattgatggtgttgggcagatggggcaggctgttgagatgcctgttaagcacaggactgacaaagctgggctgggagacaggcaggtacttgggaactcaggagggagtccaggctgcaggtgtacgttggagggtcctcacaagttagacagcattcaaagccaagactggataaggtctccaaggcagtaagtgtcaaaagagaagagactggctgggcgcggtggctcacgcctataatcccagcactttgggaggatgaggcgggcagatgtcttgaggtcaggagttcgagaccagcctgaccaacatggtgaaaccctgtctctactaaaaatgcaaaaattagcttgccatggtggcgggcacctgtaatcccagctacgtaagaggctgaggcaggagaatctcttgaacctaggaggcggaggctgcagtgagccgagatcgtaccagtgcactccagcctgagcagcacagcaagactccatctcaaaacacacacacacacacacacacacacacacacattaaaaaaaaaaaaaaagaagaggtttccaggatgagccccgggcactcggtgtttggaagctgggagagggaagaagggtgcagcagagggtttggagaaggagtgaccgcagggtgggaggaaagagagaacaggagagaaatggaagcaagaatggaccacacttgatggaaaattatctgataaaatatttttaattaattttggtgtattttgaaacaatcacaaatttaccaaaaaaatttgcaaggacagtacaaaactgttttgtttggttttaccatgaacaaaagtatttatttagaatgagaaaagtcacaacataatacaaatttaaaataccacaaaatggccaggcatggtggctcatgcctgtaatcccagcactttgggaggccaaggcaggaggattgttgagcccaggagttcaagaccagcctgggcaacgtagcaaaatttagctagaaatggtggtgcatgcctgtagtcccagctattctggaggccaagtagggaagatcccttgagcccagaaggtcaaggctgcagtgaattgttgatcatgccactgcactctagcctaggtgacacagcaggactctagctctaaaaaataaaataataaaatactatgaacatcacaaaattcagaacaataccatattagtatttcattcctatattattaatcaactggctgatgtaacacgcttcctacataatttagctgtctaccctgatcacttcttcaaatagcaacaataatatatgtttttatagagagaatagaaaagcaattttgcatttcctctagagtgattgatccaaaattgtgattttttattatcaatattggaggaagcaaaacttcttttttttttctttttttgagatggagtctcgctctgtcacccatgctggtctcaaactcctgggctcaagcaagcctcctgccttggcctcctaaagtgctaagactacaggcgtgagccactgcacccagcccaatactattttttgatgaaccatttcatattgttactgacatgatgccccttcacccccaaaatagcttgtgttttctacaaacaaggatattcccctccgtaaccacatacagtcatcaataccaggaaaccacacaactgcattactaacacctgctcttccgacccatacagattttaccaattgccctggtatcatccttagtagcaaagcatccagcccaggatcaacacatttagcagtcacatctcttcagttcctgggtctttccctgactttcatgaccttgacacttttgatgattacaagccacttattttgtagaatgtccctcaatttgggctgggctgatattttctaatgataaggtcatattatgtgacccagcaattccattcttagatacatacaaaataactgaaaacaggtgctgaaacaaatttttttctttttgaggccgagttttactctgtcccccaggctggagtgcagtggcacgatctcagctgactgcaacctcctcctcctgggttcaagcgattctcatgcctcagcctcccgagtagctgggattacaagtgtacatcactgtgcctggctaatttttgtattattagtagaaacaggttttcaccatgttggccaggctggtctagaactcctgacttcaagtgatctgcctacctcagcctcccaaagtgctgggattataggtgtgagccaccgcacctggcctcaaatacttccacacaaatgttcattgcagcgttattcaccatagccaaaaggtggaacaacccaaatccccatcaaaagatgaatggataaacaacataaggtatatccacacaatggaatatttaattcagctatgaaaagagatgaagcgctaatacatgctacaacatgggcaaacttcaaaaacattgtgtggccaagtgcggtgactcacacctgtaatccgagcactttgggaggccgaggcgggtggatcacctaaggttgggagttcgagaccagtctggccaacacggcgaaaccccgtctctactaaaaatacaaaaattagccaggcgtggtggtgggtgcctgtaatcccagctacttgggaggctgaggcaggagaatcgcctgaacccgggaggcagaggttgccgtgagtcaagatcaggccactatactccagcctaggtgacagagcgagactctgtctcaaaaaaaaaaacaaaaataaaaataagcctggatcagaatacaaagttcttctggattttaaaactaaaacttgagttctggttctggaacaagatggtacttttccttgctcctccctttggtataaaggctcactcccatgtgctaccttacatctggtaaaacctggagggcctcgagtggcctaactgcaactttccctcctcactctgctctcagtgatagggtcctctagccaaacagccctcctcatcagggacactaggagcagttcttgtttgtccctgagtattgggttttggtccctgttagcccatggaattgtgtaaaaggaccagtcacaacctcccttggaaaccatggagcaccccactctcttgatactgcaaagcctgcctcccacagaccctggctgctccttctgtccccaacacccatgtgaccctgtggggcgtgtggtgctctctgcccccaggccatgagtatatgtgactattcactgttgatgtcatctgtccagtctcaccagttgtatgtttgaccatccccacaaccccagggcaggaattcctctcctcccccaccaagggggtgaggaggaggcaattaaaacactcccctctaaacagaactaaatatcctgggaattatttaacagacagcaataaaaatgacttaaagctgcaaagagaaaggtgagctagctatggaaaaataatgcagtgagttccctgaaactttttttttctttttctttttttgagacagggtctcactctgttacccaagcaggagtgcagtggtgtgatctaggctcaccgcaacctccacctcctgggctcaagcaatcgattctcctgcctcagcctccagagtagctgagattacaggcacatgccaccatacccggctaatttctttttatttttagtagagacggggtttcaccttgttggccagactggtctcgaaccccaacctcaagtgacccacctgcctcagcctctcaaagtactgaaattacaggcgtgagccaccatgcttggccgtgtcttcttcttttaatcttccatataccctagaccaggtgctgaagattcccacaacctagaaattccattaagcacttaaaaaaaaaaagataacaaaatcttgctctctctggacaaatggacaaagaataacttaaggaaaacccgaaagacgcctagtggggagtcccatgccccctccacagcggaagcactggcaggcagcctgacccacctgcaatcacagcctgcaggggcagcgtcagcttagctctgtgtctacctgccctccatgcagtggcataagaagacccaggccctctaaaccatttagcagaagaatgtagcccgcaaacaccaagcagctcagggaagtgccttctgccttaaacgatgacatcgacagagatggggcagggctagaagtagccccagcagtgctagaagaatcaagcagttccaaatcacattgaaagtgttctgatgggccgggcgtggtggctcacgcctgtaatcccagcactttgggaggctgaggtgggtggatcacctgaggtcgggagttcaagaccagcctgaccaacatggagaaaccccgtctctactaaaaatacaaaattagccaggcgtggtgctgcatgactgtaatcccagctacttgggaggctgaggcaggaggatcgcttgaacctgggagacagagattgcagtgagctgagattgcgtcattgcactccagcctgggcaacaagagtgaaactccatctaaaaaaaaaaaaaaaaaaccagaaagaaagtgttctgatgatgaccaaactgtccctggaactaatgcctacaaatatatgtcagaacctatatactaaagctaaatagagtgactgcctgctaaaacatattaaaaaacaattttttaaaaaaggcagacttgttctgtcatcaggctgcagtgcagtggtgcaatcacagcccactgcagcctcaacccccttagctcaagtaatcctcctgcctcagcctcccgagtagctgagaccacaggtgcacaccaccatgcttggctaatttttgtcatattattatttgtagagacagggtctcgctatgttgcccaggttggtctcaaactcctgggctcaagtaatcctcccacctcagcctcccaaagttctgggattataggtgtgagacaacgcatgcagccctaaaacagatttaaataggatcaagcgtgtgctaacataatatccagtgtccagaatacaattgcaaaacactcatcatcccaaagaaccacagttcgaatgagaaaagacaaactgcctccaaaacccagataaatcagatgttgaaattacctgacaagaattttaaagcagcctcataaaaatgcctcaacaaacacttataatgaaaaaaacacttataataaaaaaaatgtttaaaattctcggcaaagaaagagcagtaatttaaacaaagaaccaaatggatcttataaaactgaaaaatacaataactgaaatttttaaaaatgtactagatggactcaatagtataaaggagatgacacaagatagaaacgataaacttgcaacagatcaataggatgtactccaactaaacaacagaaagaaaacagactgaaaaaaggaaaaagagcttcagtgttctgtggggcagtaacaaaagatataatgtttttgtatataatccaaatcccagaatgagaaaagagagtgtggactaaaaaagtattaaaagaaatacgaaaagaaatccaccccaagatatatcataatcaaattctgaaaactaaaaacaaagacaaaaatcttaaaactagccaggcaaacaatgtgttccctataaatgaatatcaattcaaatgataatgaatttcccaccggaaaccacggaggccagaaagaagtggcccaactttttttttttttttttttttttgagacagggtctcactttgtcacccaggctggagtgcagttgtgcaatcttgcttactgcagcctctgccttctgggatcaagtgatcctccgacctcagcctcccaagtagctgggactacaggtgcacgccaccaggctttgctaattttttaaggtttttatggagacagggtctaacaatattgcccaggctggtctcgaactcctgggctcaggagatcctcctgccttggcctcccaaagtcctgggattacaggcatgagccactgtgcctggccagcccaacattttttaactgctgaaagaaaagaacctcccactgcaaatcctctatccagtgaaatcatccttcaggaataaagggaaaataaagtcatttgcacacaaaggaaaactaagagaattgttgttagtggatctatccttagaggaagctccctaaacagaaagaagatggtaacagaaggaggttggaacatttaagtcttatgttagaaaaaaggaaaaaatctcaaatcaatcatttaagcttccttctcaataacgtagaaaaagaagagcaaattaatcccaaagcaagtagaaggaaggaaacaataaacacaagagcagaaatcaacaaaattaaaaaaacaatagagaaaattaaaccaaaatctggctcttcataaagatcaacaaaatatataaaactcttgcaagattgacagagagaaaaagggagaagacacacatcatcaatatcaagactgaaacggatgatattgcaatcgatcctgcagccattaaatagatactaatgggatactataaataactttacactcataaattcaacaacttagaagaaataaggttattcctcaaaaaccacaaaactgggccaagatgaaatagataacctgaattattctataactgttaaagaaattgaatttataattataaaactcctgaaaaaggaatctctatgaccagaatgtttcattagagacttgtaccaaacattcaaaaatgaatgtttcaaaagattcatgaacatcaattttgcacaatgtctttcagaaagcagaagaggagtgaacacttccaaactcattttattgaggccagaattaccctgataccaaattttgacaaaaaagaaaactacaaggctgggagcggttgctcacacctgtaatcgcagcattgtgggaggctgaggtgggcggatcacctgaggtagggagtttgagactagcctggccaacatggtgaaaccctgtgtctacaaaaaatacaaaaatcagccaggtgtggtgccttgtgcctgtaaccccagctactcaggaggctgaggcaggagaattgcttgagcccaggaggcagaggttgcagtgagccgagatcataccaccacactccagcctgggcaacagagcgagactctgtctcaaaagagaaaaaaaaagaaaactacggactaatatgtcttatgaacttagagacattctcgacaaaattttagcaattgaattcaacaatgtataaaaagaataatacacaacaaccaagtggaattttttacaggtatgcaaggttggttcactattcaaaaatcaatcaatgtcatccaccagataaataggctaaagaagaaaatcatatgattatgtcaactgatgcatttgacaaagcatttgaaaaattcagcacccattcatgataacaactcttggtacgctaggaattgaaggacacttcttcaacctcataaagggcatctacaaaaaacctaaagcttacatcatacttcatagcaaaagactgcatggtttcccctatggtcagaaacaagataagaatgttcactcttatcatttttattgaacataatattggaagttctagccactgcaataaggcaaggaaaagaaagaagcatacaaattggaatggaaaaaagtaaaactgtctctgtttgcagatgacatgttgtctacaaggaaaatcccaaggaatctacaaaaaactcctagaactaattaaaaagttcagtgagttcagtaaggttgcaggatacaagattaacatacaaaatcaattgcatttctatatactgacagcaaacaagtggaaatcaaaataaaaaacacaataccacttaaaactgctccaaagaaaatcaaatccttagctgtaaacctaacaaaacatgtatagaatctgtatgatgaaaattacaaaatggtaatgaaagaaataaaagaaaacctaaatagttggagagacatactaaattcatggatcaaaagacttaacatagtaaaaatgtcaagtctctctaaatgatctataggtttaatgcaattcttaccaaattctcagcaagaattttgtagacataacaagcttatgctaaaatttaggccgggcacgatggctcatgcctgtaattccagcactttgggaggccgaggcaggcagatcacttgaggtcaggagtttgagaccagcctggccaacatggcgaaaccccgtctctactaaaaatacaaaaattagctgggcatggtggtgcatgcctgtagtcccagctactcgggaggctgaggcaggagaattgtttgaacccaggaagtagaggttgtggtaagccgagatcgcaccactgaactccagcctggatgctgcagtgagactttgtctcaaaaaaataaataaataaaataaaataataaaatttataggaaaagatacaagacctagcttggccaaagcaattttgaaaaaagaaaaaaagggatatggtggaaggaaacactctactggtgttaagattttaagattttactacatagctacagtgagtaagacaatgtggtactgcctagggatagacatatggatcagtggaacagaatagggaatacagaggtagattcacataaagatgcctaacagttgacaaaggagcaaaaggaatttaatggaggagaaatacacttttcactaaatctgctggagcaattggacattcataggcagaaaaatgaaactcaacttgtctcacacctcatacaaaaattaaaaatggatcatggactaaaatgtaaaatgtaaacttatcaaacatctaggagaaaatataagaggaggcggggcacggtggctcacgcctgtaatcccagcactttgggagggtgaggtgggcggatcacttgaggtcaggagttcaagaccagcctggccaacatggcgaaacccgtctctactaaaaatacaaaaaattagctaggcatggtggcaggtgcctgtaatcccagctacttgtgaggctgaggcaagagaattgcctggacccaggaggcagaggttgcagtgagccaagatcatgccactgcactctagcctgggtgacagagggagactgtcaaaacatatatatatatatatatatgtttccatatatatatatatatatatgtttccatatatatatatatatatgtttccatatatatatatatatatgtttccatatatgtatatatggaaatgttcagaatctaagattgagtattatctataaaaacatgatccataaaaggaaaatttgataaaccagaccttattaacattaaaatgaaaaacttttgctttgcataagactaaggatgaagaggcaaaacagagactaagagatactatttgcaaatcacgtatgtgaccaaggactagtatctagactgtaaaaaacccctcagaattcaatagtaaaaaatgaaacaaaactctcaaacaatccaaattagaaaataggcataaaatctgcacagacattttgctaaagaggatatacagatggcaaataaagatgctcaacatcattagctggtagagaaatgcaaattaaaacttatcgagatactacagcactcctatcagaatggctaaaataaaaaagtagtgataacaccaaatgctggtaggcgtgtagaaaaactggatcacttatacattgctgatgggagcatgtaaaatagttctgccactctgaaaaatggtttggcagttcctttgaaaactaaaagtgaacttatcgtatgacccagcaattatactcttgggcattttttttccagataaatgaaaacttatttttatgtagaagcgtgtatataaatgttcatagatgctttattcataatagctccaacttgaaaactacccaaatatccttcagtgggtgatggttaaacaagctgtgatagattcataccatagagtgctactggcaataaaaaggaatgatctactgatacacacaacaacatgaatgaacctgcagaaaattatgttgaaaaaagccagtctcaaaagaataatactgcatgaatctgcttgtataacatttgtaaaataatataaagactgagaatagattcctcgttgccaggggttagggttgagggaggatggggaagaaggaaggggtatttgtataaaagggcagtactaggaatcttgtaatagcacagttaagtttgtttgttcgttcgtttgtttgtttgtttgttttgagacagaaccttggtctgtcgcccaggctggagcgtggtgacgtgatcccagctcactgcaacttccgcttcccaggttcaagcaattcacctgcctcagcctatgaagtggctgggattacaggcacccaccaccatgtctgggtagtttttatattttagtagagatagggtttcaccacgttggccaggctggtcttgaactcctgacctcaagtgatccacccacctcggccacccaaagtgctgggattacaggtgtgagccgccatgcccagccattaaatatcttgattggggtgatggtcacacaaagctacatatgtgacaaaattgcatagagctacctgcacgcacacatgcatgcacacgcacaaaggcatggataatcagtaaaatctaaataaactgttcatggcaccaatgtccatttcctagtgttgatattgtactatagttatataagatgttaccatagcagggaattgggtgaagtgtacacaggacatccctgtacatttatttgcaatttcctgtgaatctataactatttcaaaataagcagttttgaaaaataaagcttgaggcccagcagtggtggctcacacctgtaatcccagcaccttaggaggctgaggtgggcggatcacctgaggttgggagttcaagaccagcctgaccaacatggagaaaccccgtctctactaattatacaaaattagccgggcatggtggcacatgcctgtaatcccagctactcgggaggctgaggcaggagaatcgcttgaacctgggaggcggaggttgcagtgaaccgagatcgcaccattgcaccccagcctgggcaagaagagcgaaactccatctcaaataaataaataaagtttgagactttgagcccatggaggacttcactttggactctgggaggccgtctctgtgctctgctacccctctggaacaggatgtcagttttattatatgtccttacacagtgcccgactcctatggggtgctcaatgaatatttgcccaacaagaatggtaaggaataaggacattgggactccttagggagaagtgggagcccaggacgcccagctccccagcctgtgttggccttaatgtgtgtctataccaggggtcacctaaataagctctaggtatggaagagagcttgcattattccagcaatgggtacatgaaatgacaccaagctggagttcgtttattccttcagtatcttcagtaaaggcaggaggtgaaaggaccttacagctaaggtgcaggggatgtggaggggccattccccatctttctgtagggcacattgaatagaggttgttttggttgttgaagtgctttagaaaccaagtgggggcaaaaacacaagtgtgtcaggaggcgtgggtaagagaggggcattcagagttaggtgggcaggtgaggaggcagggaggtagagacggtggagtctgtcccagcatggccacgagagaagccacagccctggcaggtggggctgttcacacctctgagccacaggcacagccccaggtggggcagccctcatgcctccagtccccatcccctaagcctcagggcttacgccttgtctatgggtggcagggaagtattttctgcattctctctgttctctttcttcctcacaatggcatcacctcctgttctctcttctctcacttacataacacgagctccattatctcacaatagatgtgagtagatactgaggaggtaggagtagaaggtcttgaggtagggggtgggtttcaactccagaggtgtggctcagatgctggaccagattgaggactagctaaaacagggatgaggtggaagcagctttccataagacacgcccaccagtgcgccatgtcagtttatcattgccatggcaacacctggaagataccccctgccttttcatggcaatgacacagcgacccaaaagttactacctctttcctagaaatttcagcataaaacaccccttaatctgcatgcagataagagtgggtataaatctgactgcaaaactgctctgagctgctactctctgcctatggggttgccctgctctcaggagcagtgacagagctgcaacagggatggagctgcaacactgctgcttcaggaaagcgttttcttctacctctggcttgcctttgttttatttgttttgttttgttttgttttgttttgttttgtttttatttagacagagtctcgctctgtcgcacaggctggagtgcagtgacgcaatctcggttcactgcaaccttcgcctcccaggttcaagcaattctcctgcctcagcctcccgagtagctgggagtacaggcacctgctaccacacctagctaatttttgtatttttagtagagacgaggcttcaccatgttggccaggctcgtctcgaactcctgacctcaggctatacgcctgccttggcctcccaaagtgctgggattacaggtgtaagtcacggcacccagcctctggcttgcctttgaattatttcctgggcaaagccaagagccctaatgggctaagctccagtttggggcttgcctgtcctgcgtcaatctgaatggacatttcgcatgggcccagcacacagtgcctcccaaactataaatcagacctgttctgaggatcctgtgctctcatctcagttcttggcacccaatgtgggcctgtctctggctaagaacagtgactaggagcatgtcaccaccctccccgcccacaatgactgtttcagagatggaagtgttacccaggcagctccagagggaactttactgtgtgcatgggatctcccgcttctgctggagctgacagctactttctcacctctaggaaagaccaagaaggaaacagacgcccaggagagacaaacagagctgagggctggggcaggagactgggccctccagctacccctgaaacagcctgcttcaagacctctgagcttttcagtttatgtgagcaaatatgtttccttcattggcttatgccagtttgaactgggttttctctcccttgcaatacagagtcctcactgtattgaatgtggaggggccattccccatctttatatagggcacactgaatagaggctgttttggttgtggaagtgcattagaaaccaggtgagggcaaaaacacatgtgtcaggaggtgtgggtaagagaggggcatttagagttaggtgggcaggagaggaggcagggaggtagggacagtgggggtgataaaatgatgatctatactcacattgtcacaggcctaacatgtggattttcagcatcacatctgctgtttaacatgatagggaaaactccccatcactatgagaaactaggaaatggcatgagactagcccatgattcctgcaaagggaaatctcatctgaggagccgatggatagcagagtctagcagaatgatgctaagacctcagaacttcaggggctggggatgagggtgagctatagggcagttattaaaacctctaagaagtatattggactctggaacccccaaatttaggatttgggatgacccccacagtggtccaacagagatgtgcaagaaagagtaaaatttgtaaagaatctaattcatattcacaattttcagaggtaattgcatctaaaacatgagagcaaaaaaaaaaaatacacgaaaatggaacaatctagggacagaaatgttctcggagatgaaaaagttgatcactgaattttcatatgcaagagagcttgaatgtcaaataaaaaaataaaatgcaaaagaggcaggaggcagtgaacaacagactcgataatgaaaaaagaaaactgaggcagtgaattagaacacaggatcaaaaaattctcccagggaaaacccgagacatataaaagactaaataatacatatgaagtttgactgaaggtagctctcagctagacaaagcagaatcactggaaaagaaatgatggtcaaaaaaccaatatagagccttcaatcccagcaccatggtgggctgagctaacagaaccccctgctcaccacacacatacagaaacatttggtaaaatataataatacagactgggtatcccttatctgaaatgcttaagaccagaaatgttttgaatttcagttttttttttttcagactttggaatgtttgcattgtgcttattggttcagcatccctaatccaaaaatctgaaatctagaatgcttcattgagtattttctttgagtgtcatgtcaacactcaaaaagtttggagcattttgaatttcagatgtttagattaaggatactcagtctgtagttaataataattaataaagcatttttaaatgcatggcagctgggcatggtggctcagacctgtaatcccaggattttgggaggctgaggcaggtggattgctggagcctgggagttcgagaccagcctgggcaacatggcaaaaccccatctctacaaaaaatagaaaaagttagctaggcatggtagcatgtgcctgtggtcccagctacttgggaggctgaggtgggaggatttcttgagcccaggaggtcgaggctgcagtgagctgtgattgcaccattgcactccagcctgggagacagagtgagaccctgtctaaaaaaaaaaaaaaaaaaaagcatggcggatcatgaaagaacaaaagaaatttaaatccctgagtaccagaactggagcaacaactcaaggccagagaagtgagttcatggcagaagctgaagcagctgtgagcctatcagactagatgcagagccagggccagggctggggggtaacatctgccgaaataaaggacaaggacacagacaaccccaggtggggagctggaaccacagtatgtgtgtaaagctggggctctggaaaggctgttccctaatgtgagaagaaactagagaaataccactggagggagacaacaagaacgtctgtctttgcctggacctctagatggttaaaaaaaaaaagaaaagaaaagaaaaacaaacaaaagaacaaaccccccacaacctctcatgagaaaataaaaaccaagaatatatatgtgtaggtactggatccaaattaatactacgcacattatataagccccaaggtaaggagattcaaaacctagcccacagtagtgaaacttctggactttcttggcattaaaatgcatagttcaggccgggagtggtggctcacgcctgtaatcccagcactttaggaggctgaggcaggaggatcacttgaggtcaggagttcaagaccagcctggccaacatgatgaaaccctgtctccactaaagtacagaagaattagctgggcatggtggtgtgcacctgtaatcccagctactcaggaggttgaggcacgagaattgcttcaacctgggaggaggaggttgcagtgagctgagatcgcacaactgcactctagtctgagcaacagagggagacttattctcaaaaaaaaaaaaaaaagcatagttctgttctgtggcaacactgctgtaacttcaagtacacagagcttgattccatagacaaagacaatctccactgaagatgagctcacagctctaaaatgtacatgtgtgaagaaataattcatcttgaaggagagtcagcagactcaacatacaaaggagtatcaccccgagaattcaagacaaaagaacaaattaaaagggaccaaaataatgctgcaaaagaacaatttgaaagggctccaagggtgtaagacgataagagataaaaggactgggaattataatgaagtaattagagtctacaagaaaaaaaccccagcaagtttgaaaaagataataattttattttattttttattttttttatttttttttgagaggaagtctcactctgtcacccaggctggagtgcagtggtacaattttggctcactgtaacctccaccttgcaggttcaaacaattctcctgcctcagcctcccgagtagctgggattacaggaacgtgccaccacgctcaattttttatgtttagtagagacgggtttttgccatgttggccagtttggtctcaaacttctgatctcaggcaatctgcccgcctcagcctcccaaagtgttgggattacaggcgtgagccactgctccaggccaaagagcataattttaaacatacaaaattagcaaacttgaagacatggcaacagaaaacatagaagagaagcaaagtgaagaagaaagataaaagactttaacaaatgaacagtctcagtgacatatgagacaatatgaaatagtctaaaataggtaaaaaaggagatacacaatgaagtggggcagatttttcccaagaaataaaggtccaagatttcccagagttgatgaaatatttacactcatagatcaaagaatgttgacatcccaaagcaggataatcacaaagaaatcgtaattaaatggttgaaaacaggtaataaagagaaacttaaaagcagttatatgaaaatattttaaaggcacattacatacagggcttacaaagataagagttaatgctgacttgtcagaaacaatgcaatcaaaaagataatgaaatagcatcttcaggtgttaaaagaaaaaaaagatcacctttgctggatatagaattactggttgactttttttttccttttagcacttgagaaaatatgtcactaacgatcttcacctcaaggaatagcaaagaaagttcttcaggctgaaggaatatgacaccttggatcaaatcaaataaggaaacttggatcaaatcaaataaagggccagtcgtggtggctcatgcctgtaatcccagcactttgggaagctgaggtggaagcatcacctgaggtcaagtgtttgataccagcctggccaacatggtgaaacccggtctctactgaaaacaaaaattagccgggcgtggtagcaggcgcctgtagtcccagctactcgggaggctgaggcaggaaaatttcttgagcctgggaggcggaggttgcagtgagccgagatgacaccactgcactccaggctgggcaacagagcgagactctgccctgctgccccacccctactcccccaaaataaaaatcaaataagggaagggaggtggaaatggtagataggtaaataaatttaagccttttcttttttttaactttaaaaatatatttgattatttaaagaaaaacagtaaaactgcattttgaggtttagaacatatgcaaaagtaaactatatggtggcaagtatacagagagcaggaggtaaatagagtatactattgcacagttattatactatacatgaagtaatataatgttacttggaggcagactatggtaagttaaagatgcataaagtaaaccttagagcatgactaaaagtaaaatgaaaaagtattgctaatcagccaacatagaagtggaataaagaaaaaaaaatgtatctaaaagaaggcagaaaagaggagcaaaagaaccatgaaaatggaacaaaaagaaaataaacaagacagtgcaccaacactcaaccatatcaataattaatttaaatgtaaatggtctaaatgccaaaaggtggaaattgtcaaactggataaaaaagtaagaggaaatcatatgctgtttaagaaacactttaaggtagagcacaatggctcatgcctataatcccagcacattgggaggccaaggcaggaggattgcttgagcccaagcagtttgagacaagcctgagcaacatagtgggaccccatgtttacaaaaagatgtctaaaattagctaggtatagtggcacacgcctgtaatcctagccactcgggaggctgaggaagaaggatcacttgagcccaggaggttgagcctgcattgagccatgattgtgcccctgcactccagcccacagagcacgactctgtctcaagaaaagaaaaataaataaataaataaaaataaaaacactttaaataaaaaacagataaatgcgaaaaaaggaaaaatagatatcatataaatacttataagaaaactgaagtagctatattaaaatgttacaatgtagacatcaggatagagtattattggaaataaacaagagcattctataatgatgaaaggctcaattcatcaagaagacattaaaaacctaaaattttatgcacttaataacagagatgcaaaatgtgcaaagcaaataataacataattaaaaagcagaaacagatacaattacaatcatggttggagatttccagaatcctctttattaattgatcaaataagtagacagaatatcagtaagaatatagaagacgtgaacaattttttttttcttttttgagatggagtctcactctgtcacccaggctggagtgcagtggcacaatcttggctcactgcaacctccacctcccaggtttgaccaattctcctgccttagcctctccagtaactgggactacaggtgcacgttgccacactcagctaatttttgtatttttagtaaagacagggtttcagcatgttggccaggctggtctcgaactcctgacctcaggtgatccgcccgcctctgtctcccaaagtgctggggtgacaggcatgagccaccgtgctgagccgaagacatgaacaatattatcggctaacttgtcataactgacacttacagaacactacacttaataatggtgaaatacacatttttttcaagtgcacatggaccatttgctaaatagattgtatactgtactataaacaagtctcaatacatttaaaaggattgaaataatagagtatgttttctaaccataaaatgttaacttaaaaatcaataagatagctattaaatccccaaatatttagaagttaaacaatacagtcttaaataatctatgagtcaagaagaaatcagtcagaaaattagaaaatatcttgaactgagtaaatggaactgcaacacactaatttattagtacacagttaaagtggagttgagagcaccaaaacagtgcttaaaggaaaacttaaaaacatttagaaaagaagaaaagtctcaagtcaccgtcaccagtggggcctgatctaagctgatctaagcttccatcataagaagctagaaaaagaagagcaaattaaacccaaaagaagtagaaggaaataggccgggcatggtggctcatgcctgtaatcccaacgttttgggaggctgaggtggggggatcacgaggtcaagagatcgagaccatcctggccaacatggtgaaaccccatctctactaaaaacacaaaaattagctgggtgtggtggtgcaggcctgaagtctcagctactcgggtggctgaagcaggagaatcgcttcaacccaggaggcggaggttgcagtgagctgagattgcacgactgcactctagcctggcaacagagcaagactccgtctaaaaaaaaagaaaaaaaaaatgaaggaaatagtataaatcagggtggaaatcaatgaaattgaaaatgtacaaataatagagacaatcaaagaaagaaaaccctggttatttgaaaagatcaataaaattataaacatctaattaaaatgatcacaaaaaagaatgaagacacaaatgaccaacatcaggtatgaaagagaagtcagcactaaagatcctatagacattaaaagaataataaagaaatattataaacaaatgtatgcaaataaattgataaacagatgaatggacaagcttcttgaaagatacaaagtatcaaaactgactcagaaagatggttgactggatgcatctggtattcgtctcttccatggagaggaatcaaaatagcccacagataatcacactttggatagatcatctaagagagaacaccgaattcaacagagtagcactgaaagcaagggaggagaaagaaatgaggcagcttattcagctgagattggctagaagtctggagcagctgtctaatgcagggaaaggtaagtgaaagaccctagatccacattcctgctgtggactcctataatcctagccaagggagagcccctcgacccttgcaggccccaagatgagcatagggagctgcctagagactatgcaaaggtataaatccagaaagataactcatgctgggtcccgccaactcctgagtcttgagcagctgcagtatggcaccgttttgagagcacaggccccaccagactaagtcctgccctggcactgtactgaggcaggggccacaggcagcaatcccacccccctacccccagcagagggacgactgcacatcttcatgcaccccaaggacaaattccactgcttacaccactgccactgagggctgccgggggccaaggcatgagtgtgagcaaagcctgtacactgccccacagctgcctgcctatggctgctgccagggaatccaacctcatcctcccctgtagcaaggccacagggcagcagctgatgtcccgacctgagctttccatgagcatcctggggatcagcccacctctgcctaccacagccagagattgcatgcagcactagggggcctgaggacaggtccgccatggcctgtcttcaccaaccttaaagtatccaagcatgccatccagggacctggggatcacctgtgcacactgtccagggccctggggattgcccagcctaatccatcactggtggcacctgagcactccccctggggtctgaggtcatgttcactcaagctcccactactgccacagttggtactcatctgcatgtgccatctgtgggtctggggaccagcctgcccaacctgtcacagccattaccaactccagtgtggactgcttgggtcccggagggttgtctcaccacactgctacctccattgctcaggggctcaagagcctgcccacgcatctgactgctgccgttcctggcacccaagaaagccagcaggaggcccaagaatcagcctactaacacaagtaccagtgtatgccaccctgaggcccaaggacaggcatgttcagcccattgctgttaccactggggactgaagactggcccatttagcaccccagccctcaacaaaatttcaccacagcctccattaacaaccacaccctaagccactaaagaaattgcagacaccactggcaacgtctacagccaaagaaatcatacagagactacactaccgtacacacccagaatttaaactgaagtgccctacctaccaacaccatagatacctcttaaggaaaaagtcctccctgatgaaagcaaattcaaaaaaataaaaaggaagaagcaattgttacaccagatgtgcacatatcaatgtacggacacaagaaaaatgaaaaatgaatatgacacctccaaaggaatacaagaaatctctagcaacagatctcaaaaataaattaatgaaatcccagagaaagaattcaaaatattgatactaaagaagttcaatgagaaaagagaattctgaaaaacaacacaaatcagaaaaacaattcaggatatgaatgagaaatttaccaaaaaaccaagcagaaaaaagaaccaagcagaaattcaggaactgaataatttattcaatgaaatacaagatatatttgaaaacttcaacaatagactagatcaagcagaaaaagaatcttaaaatttggctgggttaggtggctcatgcctataatcccagcactttgggaggccgaagtgggcagatcatctgaggtcaggagttcaagaccagcctggtcaacatggtgaaatcccatctctactaaaaatacaaaattagctgggtatggtggtgcatgcctgtaatcccagttacttgggaggctgaggcaggagaatcgcttgaacccaggaggcagaggttgcagtgagctgagattgcgccattgcattccagcctgggcgacaagagcaaatctctgttaaaaaaaaaaaaaaaaaaaaaagaggaaagaaagaaagaaagagagagagagaaagaatcttagaatttgaagatgggtcttttgaaataacccagtcagataaaaataaagaaaaaaaagaatgagccaaaccttcatgacatgtgggacactataaagtgagaaaatattcaaatttttgatatctcaaaaggtgaaggaaaaatgaaagggttagaaaccctatttaatgaaataatagatgaaaatttcccaagactagcaagagatttagacatccagatacacaaggctcgaagatccccaaatagatacaattcaaaatagtcaaactgttgagagtcaaaaacaaagagaaaattctaaaaacagcatgagaaagtatctagtcacctagaaaggaaccccaatcagacttacagcggatttcttaggggaaaacttacaggccaggagagaatgggatgatatattttaagtgatggaggaaaaaaacaaaaaaaaacaacaaaaaaaccctgccagcccaggatactctacccagcaaaattttccttcacaaatgaaggagaaataaaatctttcccagacaagcaaaagctggggaattcatcactgttagaccagtcctacaagaaatgcataagggagtcctatacctggaagtaaaagatcaatactagcatcatgaaaatacacaaaaatatgaaaaccattggaagagcaaacacacaaacaagaaagagaaaaaaacctcaattgttatgactgtagaataccacaaaaccatagtgataaacaaaaagagagaaagaaaagaacaaagcgtatagaaaacaagcagaaatcaagtaatagaatgacaagaataagcccttacatatcattaataaccttgaatataaatgaattaaattttggccaggtgtggtggctcacacctgtaatcccagcactttgggaggctgagaggagtggatcacctgaggtcaggagtttgagaccagcttggccaacatggtgaaaccctgtctctactaaaaatacaaaaaaattagccaggtatggtggccagcacctgtaatcccagctatttgggaggttgaggcaggagaattgcttgaacctggaaggcggagattgcagtgagccaagatagagccattgcactccagcctgggcaacagagagagacttcatctcccaaaaaagtataataacaataaaataaaaaataaataaataaataaacatggcttaaatttccactcatatagactggctgaatggataaaaaaaaaacatgacctaactatatgctgcctacaagactgaaaacaaaggaatggaagaagatattttatgcaaatagaaaccaaaagtgagcaggagtagctatacttatataagtcagactttgtgtcaaaaatagtataaaagagacaaaaaaggtcaccatataatgaaaaagagatcaattcagcaagaggatataacaattctaaacatatatgcacccaacactggagcacctagatatataaagcaaatattattagatctaaagggagtgatagactccaacacagaaatagttggagacttcaacaccctattctcagcattagactgatcatctagatagaaaattaagaaaaaaaattggatttaaactgcacattagaccaaatggacataacagaaatttatagaacatttcatccaacagctgcagaatacacagtcttctcatcagtacacgaaacattctccaggatagaccatatgttagaacacaaaacaagtctcaataaatttttaaagattaaaattatatcaagtatcttctcagatcacaatgaaataaaactagaaatcaataacaagagaaactttgaaaactgtacaaatacatggaaattaaatgacatactcttgaatgaccattgggtcaagaaagaaataaagaggagatttaaaaaatttatgaaataaatgaaaatcaaaacagaacatatcaaaacctttgagatatagcaaaaacagtgctaagagagaattttatagcaataaatgcctacatcaaaaagtagagaaatttaaaataaataatttaatgatgtacttcaaggaactagaaaatcaagaacaaaccaaacccagaattaacagaagaaaataaataataaaaatcagagcagaactaaatgaaatagagacttaaaaattacaaaggataaataaatgaaaagttggttttttgaaaagataaacaaaattgataaaccacttgctagactaaacaggaaaaaaagagagaaggcccaagtaaacaaaataaaaaataaaaaaggagacattacaactcatactacagaaatacaaaagatcgtgagagactatgatgaacgtctacacactaacaaactagaaaacctagagtaaatggataaatccaggacacgtactacctaccaagatggaatcaggaagcaacagaaaacctgaacaggccaataatgagtaatgagattgaatcaataattaaaagtccaagacaggatggcttcactgccaaattctaccaagattccaaagaaggactaatatcaattctcctcaaactaatcaaaaaaattgaagagtaaggaattctccctactcattctatgagaccaaaattaccttgataccaaaaccagacaaagacacaacaacaaaagaaaactacaggccaatatccctgatgaacacgattgcaaaaattctgaacaaaatactagcaaaccaaatccagcagcacatgaaaaaaaaaaaaatagggccgggtgcagtggctcatgcctgtaatctcagcactttgggaggctgaggtgggaggatcacctgaggtcaggagttcaagaccagcctggccaagatggtgaaacccccccatctctactaaaaatacaaaaattagctgggcgtggtagcgggcccctgtaatcccagctactcgggaggctgaggcagaatcgcttgaatccaggaggcagaggttgcagtaagctgagatcgcaccattgcactccagcctgggtgacagagtgacactctatcttaaacaaacaaacaaacaaaaaaatacaccatgaaaaattagccgggcatggtagtaggcacctgtagtcccagctacttggcaggctgaggcaggagaatcgcttgaaccggggaggcggaggttgcagtgagctgagattgcgtcactgaactccagtctgggtgacagagctagacttcgtcttaaaaaacaaaaacaaaaacaaaacgaaaacaaacaaacaaaaaacaccatgatcaagtggaactttgaaaactatgcaaatacatgaaaattaatcccagggatgcaaggatcattcaacatacacaaatcaaaaaatgtgatacatcatatcaacagaatgagggacaaaaaaacccatatgatcatctcaatagatacagaaaaagcatttgataaaaacactcaataaactaagtatagaaggaatatagctcaatataataaaggccatatatgacaaaaccacagctaacatcataatgaatggagaaaaggtaaaagcctttcccctaagaactgaaacaacacaaggatgccttttttcaccactcctattcaacatagtactggaagtcctagccagagtaatcagacaagagaaagaaacagaaggcatccaaattggaaaataagaagtcaaattgttgatctttccatatgtatatataaacagggtcttgctctttcacccaggctggagtgcagtggtgcgatcttggctcactgaatcctccgcccccaggctcaagcgatccttccgcctcagccccctgagatatatatctctctatataaatataaatataaatatatatatatatatatatatatatatatatatagttttgaacaacatggcaagaccccatcgctaccaaaaatacaaaatattagccaggcatggtggtgtgtgcctgtggtctcagctactcagggggctgaggtgggaggatcacgcccggccaggttacttgatttttgacacaggtgctaaggttatttagcatcaagaaaatgaaagtcttcatagaaaatagtcccagacacttggacatccataggcaaaagtgaacctcaacctttatgtctcaccttacacaaaaattaacttgaaatagagtagtagacttaaatgcaaaatacaacattaagaaacttctataagtgaatagaggagacaatctttgtgagcttgggataggcaaagatgtcttaaacaagacataaaagcactaatcttaaaggaaaaacttgacaatttttttccttcatcaaaataaaaaaaactgctttctgaaaggcactttaaaaataaagtcttgaagtcaggatttaagaccggcatgggcaacatggtaagactctgtctctactaaaaatgcaaaaaattacccaggcatggtggtgcatgtctgtcatcccagctacttggggggggtgaggtgagagaattgtttgagccttggagggtggaggttgcagtgaggagccaggatcacaccactgcactccagcctgcgtgacagagagaggccctgtctaaataaataaataaataaagtcaagacaaagggtataagacaatattgtcaatacacagctcttacagaaagacttgtataatatcttacaaaagattcaataagaagaagacaactgaattttaaaatggacgaaagatttgaacagacatttcacgggctaagaagcacatgaaaaatgctccacatgattagtcattaggaaaatattaattaaaactacaataagatatcaataagcatccctactaaaatgggctaaaacgaaaaagacagatattctgagctctggtggaggagctagagctcgaatccctggctggaggaagtgtaaaatcgctcagctcctttgcaaacagtttagcagttgttataatattaaacgtacactcgataaagaaaatgtgatatatatataccatggaacgctactcagccataaaaaggaatgaaataatggcattggcagcaacctggatggaattggagaccgttattctaagtgaaataactccggaatggaaaaccaaacattgtatgttcttactcataagtgggagctaagctatgaggatgcaaaggcataaaaatgatacaatggacttttgggactcagaggaaagggtagtgggtgagggataaaatactatacattaaatacagtgtacactgctcgggtgatgggtgcaccaaaatctcagaaatcaccacgaaagaacttatgcatgtaaccaaacaccacctgttccccacaaaacctattgaaataaaaaaataaaaataaagttgaacaggagaaaaaaaaaatacactcatcacatgacccagagattccacacttagatatttacccaagagaaagaaaaacatatacccataccgagacttgtacacaaatgttcatagcagctttactcataaaaaccaaaaactggaaacaatccaaacgacagataagtgaaaacacaaattgtggtgtatccatacaacagaacactattcagcacaaaagaggataaactgctggtatgtgcaatggcatggctgattctcaaaagcataagtgatctctcaaaatgatgcctcagccagcagaggtggctcatgcctgtaatcccagcactttgggaggccggggtgggcggatcacttgaggccaggagttcgagaccagcctggccaacttggcaaaaaccccatctctactaaaaaaacaaaaaacaaacaaaaaaaatgagccaggcatggtggtgcatacctgtaatcttagctactcgggaggctgaggcaggagaattacttgaacccaggaagcagaggttgcagtgagctgagatcacaatactgcactccagcctgggcaacagaacaagactccatctcaaaaatcaaaaaaacaaaacaaaatgatgcctcaaaagtatgatgctgggtgcagcaaaccaccgtggcaaaccatgtaggtaaacatggtacaggtttaccatgtaacaaacctgcacatgtaccctagaactaaaaaaaaaaaaaaaaaaagcagcatgatgccgggcaaaagaagccagatacaagagtatgtgctgtactattctgttgatatgaaatagaaatagtgacaaaaagcagattggtcactgcctagagcaggggctaggaaggcaggttatctactaggcaggagcaggaaagcagctataggtgtggaaacgttctatgtcttttttgggtggagggtggttacatggttgtatacatttgtcaaaatgcatgggtgcattttattttgtaaaaattatgcctcaataagttggaattaaagaaaaaagaaagaaaaaatatttttatgccattgggggtagagaaagttctttttgaataagatataaaaactataaaccacaaaagacaaagagaattctactacattaaaatttacaacttctgcatatcagaagacaccaacctcaatattaaaaaacaacccacaggctgggcacggtggctcacacctataatctcagcactttgggagatcaaggcaggtggatcacctgaggtcagaagttcaagaccaccctggccaacatggtgaaaccccatctctactaaaaatacaaaaattagccaggcgtggttggtgggcacctgtaatcccagctactccggaggctgagacaggagaattgcttgtacctgggaggcgacagagcgaggctttgtcttaaaaaacaaaaacaacaacaacaacaaaaaaaactccgacagactgggagaggatatttacaacccatgtaacaacaacaacaaaagattggtatccagaatattttataaactattatgaagcaatcagaaaaatacaatctaatgaaaaatggctgggatatcactgggcaaatcataagtgaaaaaatcaaatcatccacaagcatgtgagaagatgtcaactcactctcaaccaggaaaatagaaattagaaatggcaaaatgtgatcgtcagataacagactgtgggcagggatgtggggaaatgggatccgttttgtgttcctaatggtagtgtatcttcagagaacaaattgatgaggaatttggcaagagctagggaatttgaagatgcacatccccacatcacctgacatttcttcatttagctatctgccctgcaatgctcaaggttatgtgcaccaggttaggtgctcaacatgtgttgagcactgccttgtttttttgcctttactttgttttttgacacggatctcgttctgtcgcgcagggctacagtgcagtggcgtgatcacggctcactgcagtcttgacctcctgggctcagtgatcctcccacctcagcatcctgagtagctgggactacaggcatgctccaccatgcctggatattttttgtagagacggggtctcatggtgttgcccaggcttgcattgttagccccgaagtgggaatatcctaaatttctaataattgagcaataggtaaaaaaaaaaaaaaaaaaagtatagctatgcaatggaatactatcgaagaatcaaaatgaataaactagatctagatctatatgtatgaacacggtgagatatatatatatatatatatatatatatatatatatatatatatatatatgagagagagccgtatagcaagagagggaatgcgctacagaaggatatataccgcccagaaagagaggtgctcagcaggaccctaagaaagggttcccactgcagccccataaaagggggcagtgttggagcaagtggacagctgaaaactgcctgcaaataaggagtttcccagactctggggtgtctctacagagacccaatccccggctctctgacagcgatgcaggtcttttgaacgcctgggctgctgctgcccgcgcgcctcccccgtggcaataagctatgaacaggcgctcgcaagcgctgcgatcccacaccacctgcgcggtgcagaatgcgagatgagcgagcccacagggcctccagctctgtgccgcatcacagcctcccctgcgtctttcttctctgctaccatcccactcactttggctccacagacttgctttgaggtttggcacttccacatttttaatataaactcagattctgaagactccagcatcaaatccttattttaaaaaaaaaaaaaaagaccccccaaagaaactgacttcctaactttccacctgcccattgttttctaaagaacaggtgtttgagtagcttgtaggtcgtaaccttttatcccaaaaaagaaatctattttctccttcccatgcactctaacctcaacaaacccaaatcagtttggagatggagccctgcttgattttattttatttagagagagggtctcgctctatcacccagactggagtgcagtggcacgatcacagctcactgaagcctccaactcctgggctcaagtgatcctcccaccttggcctcccaagaagctgggactacaggtgtgcaccaccatggctaatttctttattttttgtagagagggggttttgctgtgttgcccaggctagtctctaacactcagcctcaaacgatcttcctgccttgcttggcctcccaaggccttgggattgtaggaacagccaccatgcctggccatgacttctgatctcccttctgagatttggttgtaggaaggtgggggatggatggatgtgtccgaggtctgcctctaaccacatttctttctttttctttttttctttttagatgcagtcttgctctgtttgcccaggctggagtgcagtggcgtgatcttggctcactgcaacccctcaagcgattctcctgcctcagcctcccaagtagctgggattataggtgcccgccaccacacccggctaatttttttgtatttttagtagagatggggtttcaccatattggccaggctggtcttgaactcccgagctcaagtgatctgcccaccttggcctcccaaagtgttgggattacaggcttgagccactgcacccggcctcttaccgtatttctatctgagcctgcctttgcttgtcttcggtgggggaattgagaatccattggtatctgagctggagaggatcaacaaagctgtatgaagcccccttggtacagatcagagaaacctgctgagaaaagagaaccacttccctgccttcccttggaagcccaagtgtttcctgtgcctttcatatccgccctcaaggctggcccatgtggactgcatcaatgtctcccttgcctctgacttttagttggatctggctcctgggattctctggcccaagacgggaatgagagacgatagggaggaaggccctttattccctccagggccaccctccttgaaggtcacagcccagaggggctatcacatggcctttggttttttccccatcccacccacaaccagatttttgtgacagtatccggagagtgaaataaacctgcattgccattttctcagcaatttccgtctcccactccctcttctctaccaatgcactcacagcatctatgtgcagtgccttccacattctagacgctggaaggatgctgccgggagagggttggatgtagtccctgacttcgaagagatgttggtgtgtccagaagagggaggtgcaggcacagagctgccagtgccaacatgagggcagaacttctgaccatctgaccatctaaaaggcagcctctcgggctttcctgtatctctttactagataatctttactaacctttaatagagtaaagattaaatgacaaaggtggccaggagcaatggctcacacctgtaatcctagcactttgggtggccaaggtgggcggatcacttgaggtcaggagttcgagaccagcctggtcaacatggtgaaattccgtctctactgaaaatacagaaattagccggaaatcacttgaaccattggggggggggggtgcagacattgcagtgacctgagattgtgccattgcactccagcctaggcaacagggcgagactccatctcaaaaaaaaaaaaaaaaaaaggccaggcacagtggctcacatctgtaatcccagcactttgggaggctgaggcgggtggatcacctgaggtcaggagttcgagacaagcctggccaacatgctgaaaccccatctctactaaaaatgcaaaaactagctgggtgtggtggtgcacccctgtaatcccagctagtggggaggctgggatgggagaattgcttgaacctgggaggcggaggctgcagtgagctgagatcgtgccactgcactccagcctgggcaacagagcaagaccctatctcaaaacaaacaaaaagattaaacaagaaagatgatcgataataacttggcatttataagtaccatcagtcactcaagattttccaagcacttttcacaggggaggcctgtgctaagtactccagcactgagggcaggtgtacaaggcagggtaccactccttttctgcccttccttgaagagtgcagtcttttgggggaatcaggtgagtgagtggtcaacgtggctgagggatttctggtgagacagcggccagtgggccctggagtgagtgaggaagttcttggaacagcagggatttcactaatgctctcctcctacgtggaaggggctcattgagtccaagtccccaaaaatgcttacagaacaaagtggtttaaaaaaatctaaatcacaactgctggactcttatgtcatctagtgactaaccagttcctgaccaggtatttgaactgctgggaagttgccatcttgaatggatgcctggcagcagccatatcagttttcccaggggaccttgcgagcagctccacacacaggacctgggagtgggcccggggggatggattcaggtcgctttgtaggacagcatgcccagctcttccttcctactaacaatagcaaaacccctcatcaccctcatcacaagccaatctgccaacaagtgttcattcaatagctgctgtctctgcccctgctgttaccccagctgtggtggtcagtggggaggagtgagctgtttgctgagaagaggtgagatggcgagtaatagtagtaataataataacaataataataaagacagtgggccaggcgaggtggctcactcctgtaatcccagcactttgggaggccaaggtgggaggatcacttgagcccaggagttcaataccagcctaggcaacaaaatgagaccctgtctctgaaaacaaataaaaaggtaacgtatcttctaaaattatcttttctagactttgtgtaagactgaaaaaaatgaagccaagcccacaatggctcacacctgtaaccccagcacattgggaggctgaggcaggaggactgcttgagcccaggagttcaagaccagcctgggcaacatagcaagaccccctctctccaataaataaataaattagctgggtgtggttgcatgcatctatagtcccagctacttgggaggccgaggctggaggatcactggaggccaggagttggaggctgcagtgagctctgattgcaccactacactccagcctgggcgacagagtgagaccctgtctctaaaaattaaaaaaagaaaaaagagagagaatgcacaacaaatgttatctgtgtcctaggccagctgagggcttcccatgaatcttctcactaagtccttgctggagccctttgaaggaggcatcagcatcctcaattacagatgaggagactaacagggaaacagcatgtgacctgtccagtgattcaaaagtgccttctccaccgtggtgccagactgacctccgagaagacactgaccagaaggcatagcaaggttgacagctgacgggtgcagctggaggccaggcaggctggagcaggggcctggagaggggatgtggagtggcagggagagcctctgctgaggccttcctgggctaggccagggggtcagggctgcagggggagggtggagagggggaagaggtgggggtggagagagcccaggaggggagcctggcctgcagtggtgcttcaggcagaagcggccctcccaccagcccctttccagtcacataaagctgggtttgtttccatttatctgcttgacttttcagccaagatgctgtttgaaaaacatattgctctaatttaatccacatgtgcacccccaggacagagtctaaagaaagcttccgtcacggccccaaagtctcagcctcatggaggtggtaggggtgggccttgtgggtgaccccaacccacctttaagggcccaccctaaagccagggcccaccctacttctgtcctggacaagcgggtgggggtgttggtgggacaggggactcccaaggtagtgtccatggcccgctccctgcacctgcccacaggggaaggatgcaaagagcaggaggccagtggacacagtgggcatgggcttggggtagggttggtgcatgagggggtttgactttttttttttttttgcaatggagtctcactcagtctgtcgcccaggctgaagtgcagtggcatgatcttggctcactgcaacctccatctcccaggttcaaacaattctcctgcctcagcctcccaagtagccagcactacaggtgtccgccaccatgcctggataatttttttttttttttgagacagagtctcgctctgtccccaggttggagggcagtggcgcaatctcggctcactgcaacctccaccttctgggttcaagtgattctcctgcctcagcctcccgagtggctgaggtacaggtgcatgccatcatacctggctaaatttttgtatttttagtagagataaggtttcaccatattggccaggctggtcttgaactcctgatctcaagtgatccacccacctcagcctcccagtgttaggattacaggtgtaagccacagcgcctgacccagctacctttttttttttttttttttggtatttttagtgaagacagggtattgccatgttggccaggctggtctcaaacccctgacctcaagtgatctgcccaccatggcctcccagagtgttgggatgacaggtgtgagccaccacacctggtcaagggggctttgacttctaatcagttcctttccctcccttcctcagatacagacccaaactctggggcacacagtggtgacataaggcagtttatccaagcatgtggagttgggggagatgctgtctacagggtggaagccaggatgagccaggagcagggctctgagatggggcacaggaccacctacgatctcgcctgagcgcctggctgcatatgaggtgagtttaggaagcttgtctcacagccacaccccactggcaagaagccagcagggagcaaaaccagtatgttcatttcagtattctctcccaagtgtgtgcctgtcacatatcttattttgaatcaaattatgtatattatttggagggattgattgctgaaaatgagaaaagctagaaggacctgtctcacacaggtttattcagaactgagaccagagatacagcactggagcatagaactgaaatgtctgactttgattcagggcctaggacccttctggtgtcctacgagtcaggatcctggtgcactggtccatgcagaaatgacacttctctttccttctagagtcattccctccactccacaactcattgtccgcttggactaggctggattcccaagcaaagaacaatgcaggaggattgcttgagcccaggaattcagaaccagcctgagcaacatagtgagattctgtatctacaaaaaatttttaaaaattagccaggcatggtggtgcacacctgtactcccaactactcaggaggctgaggcaggaggatcacttgagcccaggagttgaaggctgcagtgagctatgatcacaccagcctgggcaacagaatgagaccctgtctttgaaaattaaaaacagaagaaaaaaaatgataatgcacaacgaatgttatctgtgtcctaggcaccatgctaagggcttcccataaattgtctcgtccttgcccgagccctgtggaagaggtgccgacatccctcccatcttacaggagaggaaactgacagtgaaacagcacttgacctgcgtggcgactctgtaacgtatcctctctgctgcggtgctggacggacttaagagaagatgctggccagagggcaccttagaactcctggtttgttctagcccatttttgtgtcgctaaaaaggaagacctgagacctgggtaactgataaagaaaagaggtttatttgcctcacagatctgcaggctgtacaagaagcatggcatcagcacctgcttctggtggggcctcaggaagcttccactcatggcagaaggaaaaagggagctgtgtgtcacatggcaagagagggagcaagagagaggggagagaggtgccaggctcttttaaacagccagatctcgcaggaactcagagcgagaattcactcattcaccaagccattcatgaggaatccatccccatgacccaaacacctcccatcaggcccccactccaacactggggatcacatttcaacatgaggtttggaggggacacacacccaaaccatatcacctgatatttgtagaaatcaatgcctggggcagctccagagtgtctatataagcagcgtacatctgggaccctcagagactccatgcccccttgtgacttctaagaattgaattcaggccaggctcagtggctcacatctgtaatcccagcagttcgggaggctgaggcgagcagatcacttgaggtcaggagttcgaaaacagcctgaccaacatggtgaaaccctgtctctactaaaaatacaaaaaaaagtcaggcatggttggtgcatgcctgcaatcacaactactgaggcatgagaatcacttgaacccaggaggtggatgcagtgagctgagatcacaccactgcactccagcctgggtgacagagtgagactccgtttcaaaaaaaaagaattgagaccccctctgctgggaaggaccaggagcagccctcagagcccatctgggtggcatctcaaaagatgctgctggaaagaaggaatctgggcagattatggggtttctgaaatgcactaatgtatttctatcagaaatggcaaagaagttgaaaatagtatctgagaaggtcagaatggaatgagtttccattgctgcctgctaaccagagaatagctcttgttcatgtctgtgactgggcaggattctcggggctgcctctgccaaaggccgagtatgggggtctctggggtcttacctggaaagctttggaatttcccaggctgcaagatactcccctttgtctcaagacaagagctcagctgtgcagccaggatgcagccatcaggagcttccttgatgctgggaagggcttgggagaccctcctggggcatggccggctccacagatgggcaaaggcagggaggacgtcctgcatttttcaaagatggacatccatgccaggtctgagtggttctggtcctatgggggtatctcctggccaaacctttggtgaaccccacctgagaagccaacaggcacttgcatggcagagacacttagtgagaacccagggtcggcgagcaggcaggcaacagagggctggaacactaggtccacaaatatcagtcctgtgcttgcgggtacctccagaggaggaggccaaagtgaaggcctaggactccacagctcctgctgtggagggagggcaggatgggagttgaaggtagggaggcgcccagatacacaggtccagtagcagatgctggccactacacacaggctccagggaggaaatctggccaacacaacagtagagcacctcttctgtaacctctgcactttgggaagccgaagcatgagaattgcttgaggccaggagtttaagaccagcctgggcaacatagtgagacccccatctctacaaaacatattttttttttttttttttgagacagagtttcactttgtcgctcaggctggagtgaagtggtgcaatcttggctcactgcaacctctgcctcccagattcaagcgattcttgtccctcagcctctccagtagctgggattacaggcatgtgccaccaggcccaactaattttttgtatttttagtagatatgaggttttgccatgttgccccggttggtcttgaactccagagctcaggcaatctgcccattgcagcctcccaaagtgctaggattacaggtgtgagctaccgagcccagccaaaacataaaaaatttaaaacagtttaaaaaaaaagttaaaaaggtttttgttttgttttgttttgttttgtttttttaaagtaaagcacctctttaattgggctgggcatacattttggtttatgagattggtcttttcaacttccagtgaccaattaagatgaaactgcctttcaccattcactcagttgataatggcagcacaaacatgtactaggtccctggctcacatggccaagggtcacaacggctgcccatgttctcctgatggaaacttttttatggctttacaaagatttgatgtgattcttttttccgtgaaggactggggctctcgacacaacgctatacagtaacgctgtaatcttggggcttaatcaaaacatattccaacaacctattctggtgccacgaatgaatgtttattttaaacaatttgctacggcttttttttttttaagagagagaaagaagggaatttcttgaagccaaatttctccctgcccttaagcttgtctctccactcgaaagactgtgtcagacgcccaagtcgtaattaaccacagagctgtttgggagaaagggagaccgagggggtatttgacaaagaattaacagatgtcatttcggcggcggctggcccactgctgctgggccatttgttggatggaagctgattcggctgctgtcgtaaacagagagtagtaataattatatccaggctgcattaagcatagcagattggatgtataacattctgttaaaaaccagctcctctcctgtttctctcgagacacaatggagacgacccccagtccccagttttgaaagccgtctccaaggatcctgacagactttccaatagggaaataggtcatgttctttcgtggctaattctgctgaggttcctgggatggcaaagggatctgctgaaaagcgagttccaggcacacttcagtaaaccagccacaccgcacaccgcagagctgcctttttccatttgaaaaatgaaagaattaaattcaaaacaaacaacttcaatttaacaccaaactacaggataaccaatcttaaaaatgtcacagcgtaatggatcttaatacccatagaaaacacaaaaacaacaccattgttccccagcaaatgcagagcaacctcgcagaatttcagtgaaggagaaagaagggaaaaacaccttattacttccaacccctgcgagccattttggtctccaaaggttttaggctgcctgaggccgtgtgtctgcagtgtttcgggaaatgacttgccttagcacgaacgctgctctgttctgcagcgacgctgcctgcccgggagcggtgccgctccatttctggttaactcttccttcccgggcctgccgctcgcaggagcagtgtgggcagggcccagggacgccactgcaacccagcttcctgcagggcagccggactggcacctctaggagcagcttctccaagaaagtggcttcagcagaacagccagctacccccaccgctctggagaatctgttctcaaaccaagctataaagcgactgtcatcaaaaggcacaacacagctgaaaccaggggacagaatcggggccttgtgggccaatactggccgatccagcctctcagggtgccctgctggggacagcttcccatctctgccacaaaaccaggaaggacactcttctggttagcagggtacaagcggagtccagccggatactagggcacaacttgggcctgaggacatggggtgagggaagcacagggacagaaacgttttcgccacatatctgagctgaaagatgacagagaaccacttagcacttaagaggttaatacaattcctaagtgttcagcaatcatggcaatttagtgccatttcgattattacacaataaacagaccatgttgtctggaagcaaatttttatgagtatagctgaaggggctgcaacttatttagctgtggaaactcgaagggaaagagacttccaaatgctaacaccacggagcagaaacacaggtagcaaagaaaggttattctcaggtcaccgccctggcaagtcaccaccatgaccttcaaaatgagtatatccttagagggaaatcaagttcaccaaagggttctttacacagaaccatttgactgataatattgttgagtttcagcgcaaaagatttgggaatttccagaaacatgttatgttcggcaaaaaaaaacatgatgttaacatgggatggggaatgtatacagggttttggccacttggaatatgcattgaatacaaacacctgcaagacagctcattcatagacacaggtcgctgctgtagcttataggtacttgggtacgatgatcacaaacctgatcaaattcctaatacaacaagaaaatcaaatatgtaaacagaattgtgggagatgctgtaactctcaaaggttctgcaaaattttatggcacactgagctccaagagacacatttttcctttaaggcacacaaaggtttggatttggggaggaggacagccttgccccagctccaccaatggaggaaggaaatcaccccagaggtacttcaagactcaaggttaaaatgtgcatgtgtgcatctatacctttatgtttgtgcatttttaggcttgcacaaggcactcacattcatgaggtgtctggaacaaccaagctgccctctgctgaacaaagcaaagaggttgttatttttacccccattttacagatgagctaactgaggttccacttaggaacctagggccccttcctggggggaattggatagtcttgtagttagcctttgtgcacaaactgcagacccaaagaggttggaggactttctcctcaagggtccctgggacacatggagctggctgtgggtggcagtggagtggagggtgggggcaagataaagctgcaaagacgcaccctgcttccagggtgtgaagagtaatcctgctttgggtagaattgggtgggggctgtgagagcatagcctctgcctggtggcatccacctacccacccatccacctacccatccatccatctactcaatcatccatccatctatccatccatccatccatccacccatccatccacatacccacccatctacctacctacccacacattcacccatccatccatccacccacccatccatccacatacccacccatctacctacctacccacacattcacccatccatccatccacccacccatccatccacatacccacccatctacctacccacccacccattcacccatccatccatccacccatcctcaacctcatgttgaggagggctgggctggatcctggggctgccatggctaatgcagacagcaaaaacgtctcagctgccaagatcaagtaagactttctaccccatctccaatataccagcctgcctaactcctgaaagcttacctgtagaaaagcaatgatctcaaacagtggaatgcacaagagttaactggggtgcctattgaaaatgtacatttctgattcagtaggtctgcggtgctggggcagagctcatggactcaaatgaatagggaactcaggtgattctctctctctctctctctttttattttttttattttggagacagagtcttgctctgtcacccaggctaaagtgcagtggcatgatctcggctcactacagcctctacctcccaggttcaagcaattatctttgcctcagcctcctaagtagctgggattacaggtgcccaccaccacacctggctaatttttgtatttttagtaaagacaaggtttcgccatgttggccaggctggtctcaaactcctgacctcaggttatccgcctgcctcagcctcccagagtgttaggattacagacgtgagccactgtgcccagcttcaactcaggtgattctcaaaacaggtagtcagaagagcacaccttgagaaaccttgattttgggtcacatttctctgtgcaaagtagtcttcttaggtctttcaaaaatgctatgttcctcggaggtgcagcatatttagttcttaacaggaatttataagatactggtgaccaccctccagtctgttcatccatccacccacccatccacccattcttcctcccacccacctacccacccatctacctatccatccgtccattcgtctatccacctacccacccacccatccatccacccattcacatatccacccacccattcacccactgtatcagtccattcttatgctgcaatgaagaaatacctgagactgggtaatttaaaaagaaaagagatttaattgactcacagttctgcttggctgggaaggcctcaggaaacttacaatcatggcgggaggggaagcaaatatgtccttctttacaaggcagcaggagagaaaactgccaagcaagcaggggaaaaacccttataaaaccatcagatcccgtgagaactcactcactatcacaagaacagcatgggggtaaccgcccccatgattcaattgcctcccattgggtccctcccatgacaggtggggattatgggaactacaattcaaaatgagatttgggtggggacacagcaaaactatattgcccacctacccacctgcccacccatccacccatttacctgtccactcattcactgctctatttatccatccacctacccacccatccatccacccattcacccacctacccacccacccatccatccactcatttgcccatccagtcattccactgaaccacccactcacccatccactcacctacccatccatccacctacccatccatccacctacccacccatccacctactcatccatccatccatccatccatccatccacccacccatccatccatccacccacccacccatccatccactcatttgcccatccacccatccactcaaccacccactcacccatccattcacctacccatccatccacctacccacccatccacctactcatccatccatccatccatccatccgtccatccatccacccacccatccatccatccacccatccacccatccacccacccatccatccatccttccatccatccacccacccatccatccatccacccatccacccatccacccacccatccacccatttatcctcctacccatttatccattcatccatgcttctgtgcaacagatctttcctggacactgattccatgaaaagccatgttctaggtgccggaatggtagaagaggtcccagcaggcagatgaaggggcagaccctaaagggagctggtgactcagagaggggacaccactgtgggatgcccagaggtagatggcttcatcacagtggtacacactcctggccatagccttagggtcccacaagcagatgtgacggatggcttacagcacattttgggccctgagggcacgaatcatctgaaagggccaaattcttttcccctcagaaagaaaaatataactcatgactgctacatggtgagaaagaggaagaggtctggacatgaaggaagaacagaaatagaaggagaatgacaatggcagccacaaagagcatgcagataaaaacacctgaggcttctttagagacccaggcaaggcctattgagagcccagagccaccgggcttagagcttttgtgtccccatgctcagtcttgatttggaattctcttggaaacattgtttataattggccattcagaacaaccttagtgcttataaagctgtcacccatgtggtccagtctcaggtcagtgtctcagacaaagaacctgaatccatcagcttaaatgtaatttcaaagtcagacaagttcaatcctgccatttctcaaacactctgaaggagatacaagatcacaagtgctgcatcttaaacctgtcccttctctcctgcctcttgtctggaaggctgcagttgctggtcttttcaacactccgcagcactcttcccaggtctctccctcttgaccctgaccttccctccctcccctttgtttccaatcctgctgcacacaaaccccaaaagggctggccttgttggccaaggagggtagtgactgggtgagtgtgagccccttggacttcttatctgaaaagtggagactatactatgacctcatgggtttgtgatccattaaatgaaagaatataaataaaacatttagcctgtaatcccaacactttgggaggctgaggagagaggatggtttaagcccaggagtttgagaccagcctgggcaacatggcgaaaccatatctctaccaaaaatacaaaaattagctgggtatggtggcatgtgcctgtagtcccaactacttgggaggctgaggtgggaggatggcttgagcccaggagaaggaggttgcagtgagctgagatcatgccattgcactcaagcctgggttacagaaccagaccccgtctcaaaaaaaaaaaaagaaaaagaaaaaagaaaagaaattaatgaaggcatcaggcatcagtacatggtagacaattaatgaatatcactgttctcacgggaaaacctaaaatagggaggaaatcacagattttattatttcagaatttattatttcatatgggatgattctatatcttacaaaaataaatgtataacttttggagaatgtttgtctaatttacggcaaggagaagtggagtgtaaagttagtattatgcaacattttccccagataattcccgtattgatattctaatgaaaataggctccccaaattctgcatttttatcgtgtgtgtctatgctagcatttatgttatattctgaattaacaaacttcaaacgctaaaaaattacatatgcagaaaaatagggaaaagggatatgcatcttttgtaagtctcagtggagcgcaggcaaacctctagccctatctgatactcctagcttaaaccacatggtagttttggaatgggagaacattaatgactacaaaacaataagaaggctgtttagacatgtgcaaaaaaaaaaaaaaaaaaggaaatctttaaaatcaggctgtgtctttatcattgaatgcctactaatgaatatcattctcaataaagaaacttctggctctctcatgttctgtttgttaaaatagcatccaagacattttctataacgcaaacttaatgcaaacccaaaacaaaataaaaaggaaagaatgtcaaaagaacaaacttttaaaactctgcactttttttttattattagatgctattcctgacttgttaaaattgatcaaatagaaagctgtgaaaagagaaaaaattaagccaactagaaaagtgtgacttggatttaatattttataattgccaagggacatactgagatcaatgaatttttgcctgaaatgaacgtcagaaagagatgtacttcagtcttttagggaacattggtctatttaattcttgtgtctgatgcatgtgaaataggcctgcctcggccttctttctctgccgggggtgttgctggcagcggacattaccacttttaataggccgctgtctgaggagtggcaagggagcccataacccatcgactctaatggatcagcctgtttattcacttacaccttttttttttcccagctaattttagttttgcatgctgagttgtttcgctttgaattaaatgaatagaaacaaagggaaaagcctgtgcagctaataaaccatgatgatgttcacggccctctcaacaggcttctccacatagcaggtatcccatctgagaacagattcactgtggcattttctccacttgttgacgaaattaacattttatacatgctcacattcagaggaaaaaaattaaattattcaaattgcttgatcgagaatgcaccgttgtttggagtagacctacgcgcccagcctcaggccaccgacatcctcagatttcagacaccggtcagtgactttttctgcctgggggggtcatcccacagctctccgtggggtcacacaaacaggaaaaatgccccagtgctttgctttgtctaatgaaaaaccagagagacacaaggaggctatgtcagcgtgcccttcaacagaaataacaggagtcagtggtttaaaaacatccccctcccaaactccctctctatgcccagagaacttgaagaaggttccagaaaccttttaggtcgatagctgccaaggggtatgagagagacaagaatgtccaatataagagagaggggaaaggggtcagcttccccttatcttctgaataggacccattttccatttggggtttggaattgtcacaaagaccccaatggcagaggagggggctgcacccgcctcttccccattgagaactcacaccgattccctgtggtccctgcaggttagaggggctaccatgtccccaccaccggtaaagcctaggaagggggctagtggcctgaactccagaaaaggcattctccacttgtgggagaaacaatattccccaaaagaccaccccaggaggtggagatgagaggatcgcttgaacccaggcattggaggctgcagtgagctgtgatcaccactgtgctccagcctgggcaacagagcaagacccagtctcgaaaaaaaaaaaagaaagaaagaaagaaaaagaaaaaaaagaaccactccaaaagattcaccctccaaacagttcaactccaaaggttactgccctaagggtggtgccatacggcatggctgtgttgtctcctggcaaaaaaaaaaaaaaaaaaaaattaaataaagttgttgctcaatcagaagctaagataacttgcaaagtgatctggaaaatattgagagaatttagactagctgggagaaatagaacatgctctgtcattaaatcaaataaaaataaaaataggtctctctgagtattaagcagaatgtcaacaactctctgaatgaaatctattttagacacaacaatagtatgataccctacttttgccctcatgcaattaaaatagggtaattttttagaccatttcttgcagctataatctgtcactaggagaagaaagcccttagcaccccagctgtatccagtttcacacatggcttttctttcctttctaccccacaaatctcaataaaccagaagtcagtcagctcaaactcctcagccctgcctttttaggactcacattccttagctgtgctttcttccctcaaaaccccaagtcacccaaatagcattttctccattcagcagcattttttttcttttcttttccttttttttttttttttctctgagacagagttttgctcttgttgcctgggctggagtgcaatggcatgatctcggctcactgcaacctctgcctcctgggttcaagcgattctcctgtctcagcctcctgagtagctggattacaggtgcatgccaccacacccgactagtatttgtatttttagtagagatgagttttcatcatattggtcaggctggtctcaaactcctgacctcaggtgatctacttgccttggcctcccaaagtgctgggattacaggtgtgagccaccgcacccgaccattcagcagcatttcttatacaaatatgcactgactcctaccatgtgcaaagcactgaacctgatgtttaatcattggcatggagctaagtaatgcacatttcttttttcttttcttttttttttcttttttttttttgagacagagtctcactctgtcacccaggctatagtgcagtggtgtgatcttgacacactgcaatctctacctcccagattcaagggattctcatgcctcagcctcctgagtagctgggattacaggcatgcaccaccacgccaggctagtttttgtatttttagtagaagtgagatttcactatgttggccaggatggtctcgaactcctggcctcaagcgatccacccaccttggccacccaaagtgctgggattagaggtgtaagccactgcgcctggccacacatttctatttgttaaagaatgaagaaatgtagtgggtagggtccctagcggaactccctgcacagtgtccttcaacccagagcctaacaggctctctctcatcaatacgcaagttacaataaaataattgatgggcccacaatgcatgcccacaggatggccgtgagcaagaaactctcaccgtgcaagaaaccatacagtcacagaataattctgcttcccctcgatttgtgtgcctggacccagatccccgctctcagacccagtgtgcaaagcagagagggaacaacagactcgagttggaagtgatttacttcattagctgggattacaagtttaacttacaaaccagaggtcaaaatttctcattaacaagggggccgtgaatcgctgcaggctttggttcaagaggagaccactcttattactaactacacatttcaatctgtctttgatgttctccttcttccctcctcccttttattttttggcagaggagctgattttaattgtggcactacaaccaggctccctccatcccagggagcagcctcccgtctgctgctgcctggcgagtgagtttgcaagattgggtgcagtctatcgctcagggcacattttaatggctcccctctcctacaaggcttggattgttttccacgtgattctggttaatttcgctgcgggaaagggcattggttttccttgtgagcttctgatcagtctgcctcagagaggtgaaatagattaaaacagagaaggaggcgttgtcattccaactttccggacgcgaggaccagacccagcacatctccagcactcagaatagagagaggagtttgacagagaccgttatgctacaaaaagcgctcttttgagaaatcagctttggttgtttacaaaatactcaggttgccttcaagtgccccttcccttcaaaaccaccaccaagggttaaaagaagcaactcaaacgagataaaacttctgcagggtgcacttatcctgagaatctcagaatcccacactgcagaatccttttccaaataagaagaccaggaaattgtagcagcagttatgtattattgtccagcacaaataaaagtgcttaacacgcactgttctaaagaccaagacccgcgtgcaggtcacagtggcacaatgaccaatgtcactgaaccagggcttcaaatggagtcactgatggaaaggattccactatctaattatttagaagtatagagtatagccattattgaaaataactaaattgttattccggtctagtctgggaagaaggtcacattcaaaccgcataagctctaaatattcctcagttgctattcatgcgctgtgaatgtttgttctccctgagaaatgttttcttagttgccgggtgaagagcccgtaggtagcacagaggctgtggatggggctcagtgcctagtgcccatcagagagcctactaagctgaccccattgcagagagtagaggcagcttccagcaaccgggctggcctgctcggctgcacgggactcccagcatgttccaggtgtggcagcttgctgtggaagccacggtgccagggggacaaaaactccttgtgcaggaccagcacagtggctcatgcctgtaatcccagcagtttgggaggctgaggccagaggatcccttgagcccagaagttcaagaccagcctgggaaacatagggggaccctgtctttacaaaaaataaaaaacaaacaaacaaaaaattgtccaggtgtggtggcgtgcacctgtagtcccagctactcaggaagctggagtgggaggattgcttgagcccagaaggtccaggaggttgaggctactatgagctgtgatcacaccactgccctccagcctgggtgacagagcaaggccctgtctcaaaacaaaacaaaacaaaacaaaaaacccaaaaccacaactcctcatgcaaaacaagcaggggtggctgcagtgtcctgcccagttcccatccggaacccccaggggaagcagggggcttctcatccatggagaaattactgccttctttgctttattttattattattattattttgctgctaatgtttagttttagttccttttatgtctccagttccctttaacaaaaacactgattagaactcaaggaatccatgtgacctggaggtgaagagcagttctcagctggggacaatcatcaggctcagacccaggaagcaccagtggctccgggtcacaggggcccgaggcaacccggccatctgggccctcagccacttcctggcgccacccgaggcaccccaggccaagccaggcagtcaccttgaccgggctgctggggcgtctcacccgcgcactgtccctccctgttcccaccccctccctggcaggcagctgttcagctccaacaggggcctatcttaacaacgagacattttagaaaggtccttattgctggtctaatttcaaacaggcaccacaatgaagaactgtctttgtatgggattaattttaaaacctcaggatttgatgtcagtgggaaaaacacagtgtgggggtcaaactgctgccttctcctccttctggccagcccaggggctcatttcttaggagatgaaaactctgacaagcccttcagtcaagctgaaagcaggcagcggtccagccacagccacaggcctcccgggcatcctgtgacccctccgaaaagtcacattcactttgctcttgagaaaggaaaaatcatgctggaggcattttatttgaaaccatgtgaaataaggaaatgtgaagatgtgaaaatgaagtgaaaaaaaagttagaattcatttccgtccttgcaatggcttagaagccgagctggttcattttgaaagcgtgtaaaaatctgatccattcaccagtaggcagagactacaaaatgcttaaggtaaaatatgtaaatatgtaaaattatctgttgaaaaccatctccttttgtgcttgaaagaattttttaaagcatctttatttctattctgcattaatatactattgagcagaaaagtttcttttggcaaaacaacaaaaaaccaagatgccagaaaatttagtgattctgaaatgaagtccatgggaacaaaggaaggacaaaaaggatttctatcttctcgtgcacttgtatggcactttttttgtgtgataatttaaagcatatcattaatataacaaattatagaattcattttttaaaagcattgttcacctgaaaacttgaagcgaacctcaccttcaggcctctgctactgtctcttttggaagtgggctccctcttctccccgggtgtcccctgcctcacctgacccagcccccgctatccttgatagatccagggacctcccagcagtgtgtttggacccataccacaaataattggtcacaaacagtttatcttatttctagatatttccaaattaatttttttgaaatatggaaaagaatggccggatatatgcctatagctatgtaattatcattcattcagttggatttgaatccattgtattgcaacaaacgtggtttcatcacacaacttgcaacttccagaaataggggggttagtggttgttgttttttcctttcccctaatccaatttcttctggagggggttcaaccaatgaatgttttgtctcataagccaacacctcgtaggtagattgctgtcatttcttgtctcctcctgagggagacctatcactgtggactgggcctccagccccactggccagggttggagggatgagcctcagattgggaaggggtgtgcctgaaaccaaatccactgagctctcaagccagatgaacaaaaccctcagatcctggaggggaagacagtgtctatacttggccctgtacgtatggcagcagcattgtttggggaaggtgaaggtgcttaaaactggaaaattgttcttggttttgcaaacccttgggtgttttctgaaagatcagacaatggaaagtagaaagctttctctaaaacaattttcaaatctgtttattctactagacaccctcgtattcctagcgcttgtttctacgttttcttttgtttaaatctcttattgtctcaaaaaggttatcaaaaaataaaaataaaaaaacgcatgtgcacacacacacacacacacacacacacacacacacacacaagattgtgtccagaagactttccaagggctgggagtggtagctcacacctgtaatcccagcactttgggaggcagaggcaggaggatcgtttgaagtcagcagtttgagaccagcttggcccacatggtgaaaccccgtctctactaaaaatacaaaaaaattagctgggcatggtgatgtgcacctgtaatctcagctactcaggaggctgaggcaggaaaatcatttgagcctgggaggcggaggttgcagtgagctgagatcacaccactgcactccagcctggctgacagagtaagactccgtctcaaaaaaaaaaaaaaaaaaaaaagacagttttcccagctcatccccacaaaacctacctcccagctcccttcctgtagacctaggcagagagagaccagctctagagaactcaggaaaggtaatgttagaaacctgagaactgacagggtcaggaagatagcctgagcagcaagaagtatggtctagtatggtgaaattttgttcatcttagatttttttttgcattagtttttatttttaaaatattgcattaaaatagtatctatttattactgggttattgggcacctccttaaagcctgccctcaggcaagtgcttcactgccatcatcctggtcctggccttgccctggggaagagatgcctgctgacatccgcttcagcttcgccaggctccagcctggaccagctaacatggctgtggaggagccacttctctcaacacccctctgttagggaggaggagacaacttcttttattttgttttatttatgtatttatttttattttttattttttatttttattttttgagatggagtcttactctgtcacccaggctggagtgcagtggtacgatctcagctcactgcaagctccgcctcccgggttcatgccattctcctgcctcagcctccggagtagctgggactacaggcgcctgccaccacgttcagctaattttttgtatttttagtagaaacggggtttcaccgtgttagccaggatggtctcgatcttctgacctcgtgatctcgtgatccgcctgcctcggcctcccaaagtgctgggattacaggagtgagccagcgcgcccggcctatttatttatttatttattttttgagaagagggtcttgctatattgcccaggtaggtctcaaactcctgggctcaagctatcctcctgcctctgcctccctagaaacaacttctttactggccattggcaagccaagttcattgaagtctccctcctaaacctttacaaagatttaggaaacagattaacaataaaacttcaacaaacccaggatgggagagttactgaattaaattagagcttttctcgtacatcacgctaaaggtaaattattttgtttattcgaagccacattcatattataaaatggtttgcttctctctctctgtctctctcaaagagatgaggtctcactgtgtcacccaggctggagtatagtggtataatcacagctcactgcagcctccaactcctgggctcaagagaacctcccacttcagcctcctaagctgttaggactacaggtgcacatcactacctcttgctaatttttttaattttttgttgagacaggattccgctatgttgcccaggcaggtctggaactcctggcctcaagcgatcctcccaccttgacctcccaaagcactgggattacagatgtgagtcaccacacccagctggtttgctgttctgataaaggtcttgaaaagacaagaggagatgtattttattggcatcattatcactaactagcaccattgcttactgaatgccatgcatggagctgagagctctacaatatacattattttgcttagtctccagcaactgcaatggcaaatttgaggctgcacaaagatacacatgctggcctcagggctgagccgggatgtgaagtcagatcagactccagagcccacatgccatggagccttggagacaggtttgctttcactctgttatcttgcacaggcctaactctgggcagggatgctgagcccagggctgaggcttggccaggcggctgcaatcgcagatcaaccctgtaagcctgaggacccgcagcttccgtgggaaggtacagacctcctgccctgctgcacagccctgggcagagcaggcatgcccaggaccacactccacttcctccggatggtgccttcagtggagtcagcggcaggaccactgatttttcattctaggtccctatgcaaaaataataaagacttcctgtctgagcactagggtaaacagatcttagctaaagggaggaggaggggttgtgggaagaacctctgttgtcccagctggaaacttaagcaccaggaaatgcatttccgcgtgttcccagcctgccgaaaagtcaggcacaccaaggacaaagcaatctccaatgcctggcccaaatttggcttttccccttccccgcctgctcctccaggcttcctgggtttttcactctcctccgtttcccctctgggcaagcccagagggtgtttgtttaaagtacctttcgctaacattccttcccagccattctcacagcttttcactttgcattacgcccagagcccctagatgcagtctctttacccagccaaccctctttcaaaaactaacctatattttacatggagaactttaacccgtttgcctccaaaaaaccctgtaacattacagagacgctaaagtctccttggacctctaaaaatccatggctacccacttcagctccccaacaggtaagcactgaagcactgactttggaatttttttttcagaaatgtttcctgtttttgcaacatacattggacttcattaaaactatggcatgtgaatttttttatttttatttttatttttgagacggagtctcgctctgtctcccaggctggggtgcagtggtacgatctcggctcactgcaagctccacctcccaggttcaagcgattctcccgcctccgactcctgactagctaggacgacaggcacccgccaccatgcccagctaatttttgtatttttagtagagacgggatttcatcatgttggccaggctggtcttgaactcctggcctcaagagatctgcccacctcggccacccaaagtgctcagattacaggcgtgagccactgtgcccggccgaggcatgcgaaatgttattgatgagtttggttactttttttacatatatactgttctacgcatttttttttcactcaacaatacctcttaaagatctatttgcatacacacagatccaagtcacttaaaaaaattttttgtataaagccccatgctgtgaactgcttctatctactgaggcattttgatattgatgggcatttaggcttctgctatttccaatgctgcttcagagacgctttctttgtgcacatatacatttctcgagggtagataacacagaagggaaattgctgggtttcacggtatgcacatttctagctctgagggcatccaaagtgcagctgtactgatacacggggcaccagcatcctctgggagcagcgcccttacaggcctgctagtacctatcggacttttaaattgctgcccttgtgatgggtgacaagtgttgcttaatttgtatttcccttaagatttggtagggtcaaacttttttttttggtaatacattttacaagtcctttttcatacctcttctgtgaattgcctgttcatattctttgcccctaaaaaaaaaattgagtagtttgtctttaaaaaaaaaaaaacactttatggatctatgattgacatataaaaagctgtacatactgatgcatacaacttgatgggatactatacacagccatgaaaccatcaccactatcaaagccataaatatatccatcacctcccaaagattctcccattccctttatttatttatttatttatttagagccagggtctttttttgtcacccaggctggagtgcagtggcacaatcacagctcattgcagcctcaacctcctgggctcaatcaatcctccatcctcagcttcccaagtagctgggactattgcttttgagacggagtcttgctctgacgccaggctggagtgcagtggtgtgatctcagctcattgcaacctccacctcctgggttcaagtgattctcctgcctcagcctcccaagtagctgggactacaggcgcacgccaccacaccgagctaatttttgtatttttaatagagacggggtttcccatgttggccaggatggtctcgatctcttgacctcatgatccgcccgccttggcctcccaaagtgctgggattataggcatgagcctccgcacccggccaggatctccttttttaaggctgaattgtattccatcgtgtatacaccacattttctttattcattcatccatcaatggacagttaggttgtttccatatcttggctattgtgaattgtgctgcaatggacatgagagtgtaagtatctttttgagatactcagcattgctggatcatatagtagttctgtttttatttgttccagtaaccttcacactggtttccatgatggctgcaccaatttacattcccaccaacagtgcaccagtgttcttttctccacatccttgccagcacttattgccttttttaaatttatttatttaaataatagcgatccgagccaggtgcagtgactcatgcctgtaatcgcagcactttgggagtctgaagtggatggatcacctgaggtcagatgttcaagaccagcctggccaacttggtgaaaccccgtctctactaaaaatacaaaaactcgcctgttgtggtggcgcatgtctgtaaacccagctacttgggaggctgaggcaggagaatcacttgaaccgggaggcggaggttgcagtgagccgagatcatgccactgtactccagcctgggcgacagagtgggactccatctcaaataataataataatatccatcctaacaggtgtgaggagatacctcattgtggttttgatttgcactgcctggtggttagtgatgtgtactttttcatgcacctattgtatgtctcgtttctcttttcaaaccattgctgcttccctgcttaggcacacacaggtgctggggacatgtgggatctcaaaccacctaattcactttggagatgggtgtaggctgcagcagctgcaggctaccctgtgaacgcacagagctctgcagccgcaaacgggctggcctcctcactggccttggcctgacatgtgatgctctgagggactccacctgcaggagcctccacagtgagtgcctgctttacgcaagtcctaaacaagcacaattgccacttcctttaaccccacgatgctgacagatgccaacacctggttccaagagttgccccaaacctcccagtggggccttgggaagactgggatttgaattcagatcagcctgtctgcagtgcccatgaccctggctgagctgagccgggttgctcccggacgctgaggagcgtgtgggtgagtgtgggcagggcctggcctcagggccctgtacccttaggcaacacccatgctctccctaccaggtcggtgccctggttcatcccctgagcctctggaggcagagtactagggagctgggcttctcagtgaggggaaccttcccattcccccctcctcacagctcccacctcagaggatgctgggtaacaggagcacacacagagtgtcccccaacccccaccagctgagaaaaccttggtgaaggccagaggcccacgcaccctgggtgctcctgccccaagaggagagagagagagagagagttgggggagggattcctgcaggtgaacagatcaaattttggtcaaattccaataaattctcacttaattttaacatttaatgttgaaaaatcctaatggtgacctgattccctcttttgaattccagccctcccagataacctatctctcgaggtgacaagccggtgccacctgaattcattactgcctgattaattatgctgcctttgtaccagggaaacagggacttcaatcagccgtggccgccatcccctggccgtcgcctcaacaggccggccgctgtcagggagcctggcccctcgcccagctcagggttggccgagaagctgggcgcagtggctggtgagatgtggctgcctgcaatcagagggcctgggatttggggtcctttctgggcagtcaagggagagaggggtgagccaggtcagaggctgcagagtggagatttctgctctgtccctggagaggcctgactgggaggccctccttggggccttgagctgtctggacataccagacgtcactaaaactgggcattgtcccttcaggaggaggcaccaggtctcagaaggagctatttcaagcacatgcatcccgtgagatacatgattactttggcaaaggggaaggttttctggccagctacctagacccgtgtgtgggcacagccctcacagacatctctgcggagcttcaacatggtgtcagggagggtcaactccaggcactgaggccaggcaagaaccagcaccctcagctctgctggttcattagcctgacggggtatggctacagtggcctttggtcctgtgcatcctgcatttgtcaaggtccacaaacttgtgaaacccagtcccatctgcagagtggcagatgatgtatttttttcaaagaagaagaagatgagattgcttttaaaatgtgggttctctgcccctactctgagcctacacagcatggggggaccacagaaggggtaccccctagcccaagtgccccatgagccttggcctcagcaggtccggctttgaatcctactccgtcatggatgtactgtgtgactatggccaagttactcaacctctctgagtctgggttttcagagagacatcactatgtgtcccacagggtggttatgagagaaaaataaggaaacacacacaaagccctttatgttgcccggagtgccttctgacatgggccagcttcacacagctgctgtggtgacactttgtctggggtgaacagtcaaaagggcagggttggtttcattacttggctgtgtgtgaacacatcatctgggactgaacccatccttgacccccgtccccccgtgaagcttcagcccctgggagaacatgtattcttgtgtttttttggttcttggcggagggtgggagggttgtttttctgttttttggtttgtcttttgtttttgtttttttttgaggcggagtctcactctgttgccaggctggagcgcaatggcaccatctcggctcactgcaacctccacctcctgggttcaagcgattctcctgcctcagcctcccaggtagctgggactacaagcatgtgccaccatgcccggctaattttttttttgtatttttgatagagatggggtttcactgtattagccaggatggtcttgatctcctgacctcgtgagccacccgcctcagcctcccaaagtgctgggattacaggcgtgagccactgcgccatgttcccccaccccgcccgccttttttttttttgagaccaagtctcactctgttgtcacccaggctggagtgcagtcgtgtgatctcagcttactgcaacctccgcctcctgagttcaagcaattctcctgcctcggcctcccaagcagctgggattacaggtgtgcaccaccacgcccagctaatttttgtattttaagtagagacagggtttggccaggcctgatcatgttggccaggctggtctcaaactcctgacctcaggtgatccacctgccttggcctcccgaagttctgggattacaggcacaagcctccgcacctagtcgagaacatgtatttttactgagcgattttgcaaaaccccatttctaggccacaacagggccatccacaccaccagctctgctgcagtgccccacccaagcggcccttcctccaggcttgacttggcctccttctaagccacctggcaggtgcgatcagagaggcctgtcccacagggcaggaagggagaacacaggttccaagaaggcctaggacagttgctcgtgttctggggtgtaagtgggcaatgtgtgtgcagagggaaggcagggaagccatggggagtccggcagtggttcctggacacaggtaaatgggagaggggacattgccaatcagaagtcaagaccagagttcagtcaagggaaaagtctgagtccaggctgtttggaaatggtcgtaagtccagcacaagaaatcttcagcccatgggaagtcctggggcttgggctggtgtccatggtgcagatcccggggtgcagaagcagagtcagagcagggctgaggcgtctaaacctccattcggagccctgacttcacctagagcacacagggtgaggtcctgccagacactggtggctgggtcccagaaagaaagttctagttagtacctgaagtctcctgaggataggagggaggtggctggggcagggaggctgaggtacatatacccaacagaaaatggggcaatggcgtctgtaaaatctctttagcagctgaacctacatggttcaaactttagaggtttaaaaagaagcaaatttggaaggctataaaagatacacaggccacttaatcaatggcttcaccttcaagtgggggcagtagccaccttctttggattccaggtgcctagtccaagttccttggaggggaatcttccctccccaccccctaccccactgagctccctggggaaacagcatgaagcccactggagggccatttttctcagtaggggaggttagcactctcctggtgcccagatgtgactctgccaaaaggcttctgaaaaagacaggacaaaaagcagacagcggggcaggggctcctactcactacccctttaaagtcataatatatggccaggcgtgttggctcatacctgcaatcccagcactttagaaggctgaggcaggtggatcacttgaggtcaggagttcaagaccagcctggccaacatggtgaaaccccacatctactaaagatacaaaaattagctgagtgtggtggtgcatgcttgtaatcacagctactctggatgctgagacagaagaatcgcttgaacctgggagacagaggttgctgtgagctgagatcacaacactacactgcagcctaggtgacagagcaacatcctttctcaaaaaaaaaaaaaaaattataagatgcccattacactggtaagagattaaaggatttgcccaaaggcaaaaacccaactgctatgtactgaattgtgttcccctaaaattcatacattgaagacccccccaacccccaacatgatggcatttggagacagagattttgggaggtaattaggtttggatgaggtcatgagagtggggcctcatgatgggattagtgcccttagaagaggaaataccagagagctctctgccatgtgaggataaaggaagaaggcagctgtctgcatgcccgggagggagccctcacccgaatctgactgtgctgcattctgatcttgaacttcccagcctctagaacttctgtgatttaagccacccaggctttggtattttattatggcagcccaagccaactaagacaccaatgagccgtcttctcttctctcttctccctgtgtagctgtggagtcacattgttggccaagtggatcaggagaataccttgctccagccaaagaagccattttacatagacaccagttcctaatgagtatgtgaaccttccagaaactgtcaagggaaagccaggatcgtaatggccagaggatcccccacaaggaccaaggccttctgccaccttcccctgctcatcctatcacccgccaggagatgaaaggctggtgccgagtctgcaggcagggggccacagggtgagcaaggggtggggcaggctccagctttgaaccctacctaggccatctctacccatcaggagagcagacacagagcctgaaatgtgttcccctggtctccccaaatgccacccccaagcccaggagctccacaagtggggaagaagatctctaggaagcccacctctcagctgcctagtatgctgggaagagcagtaggccaagagtcaaaagacatggcatctgtaggtcacctcctcaatgtgtaagctgggatctcagggcaagttacttcacctcctggtggcttaatttctaatctctagtgtatcaacactcccgaattgggtgattatagagatcaatgaaatcaaaaataataggggcttggctggatgtggtggctcatgcctgtaatcccagcattttgggaggcagagatgggtggatcacttgagctcaggagtttgagaccagcctgtccaacgtaatgaaaccccatctctactaaaaatacaaaaattagccaggtgtggtggctggtgcctgtagtcccagctactcaggaggctgaggcaggagaattgtttgaacccagggggtggaggttgcagtgagccgagatggtgccactgcactccagcctgggggacagagcgagactctgtctaaataataataataataataataatagctctctaaaggtgcattccctttccccttccctcttttttctttctttctttctttttcttttctttttctttttctttttttttttttttttttgagacggagtatcactctgtcatcacccaggctggagtgcagtggtataatcatacctcactgtagccttgaactcctgggctcaagccatttttctgcctcagcctcccgagtagctgggactacaggtgtgtgccaccatacctggctaatttttagcttcttgtagagattggggtcacatcacattgcccaggctggtcttgaactcctggcctcaagtgatcctccttcctcagcctcccaaagtcatgggattacaggcgtgagccaccgcatgtggcctgttagctcttaattttgtaagtatttcacaaagatcaataactaggaagaaaaatcttccccactcacttttttttttttttaagatgaattagtattttggaaagaatatgggcctaaagtcaggggaaaaaaaacaagctaagtagaatagttcctgctactacctaagatctcaggcaagtgaactgttttcttcaaagcttcaatttcttcatctaaaatatgagggaatgaatcctaccttgtaatgtggctgtgaagaacaagatgttactaggtcaagtgctttaaataagggcctggaagagaatggtaacagttacagtagcttattaaatgaatctgcagatggagataagaatgacgcctaactcttgatgttataaagattcccagagttgtaaacttgtaaactgtttagcagagtcccctctcattttcaactgttaagcagtttttcaaaggaaaatagagtttcagccatccagttgtaggggtactactactttataattacatgaaaatcatatttttcatctatgagcaaggggtttatcatctgaaaattttaatgatgaaggcatctattttacaatctctgcagaattatctgctttctctcccagtgtgctaaagattactccattagtgagattcatggctaagatttctcttctgagtcaaacatcataacttcaaggcaacaacaacaaaaaaacatttctctggacaaaaaggtctcttttgactaaggtaaggtatgatgatggttttgctctcaggggtttgctggccttcctcaggaagttttcttttcttttcttttcttttcttttttttctttttttaatggagtctccctttgtcacccaggctggagtgcagtggtgcgatcttggctcactgcaacctctgcctcccgggttcaagcgattctcatgcctcagcctcccgagtagctgggattacaggcacccgtcactgcacccagataatttttatatttttagtagaaatggggtttcaccatgttggccaggctggtctcgaactcctgacctcaggtgatccgcccaccttggcctctcaaagtgctgggattacaggcatgagccaccgtgcccagcctcttttttctttttttaaatagatatgatatcttgctgtgttgcccaggctgatgttgaactcctgggctcaaatgatcctctcaccttagcccccaaagtgctgggattataggtgtgagccacggcccccagcctctgcagtaatttttttaatcaggaagaaaatgaggctgtccacagcctctcaaagactccttccctgagaggggagaggcagtagtgcaagttcattcctcaatgctaagcaaagagagtcttattcccgaatgttatttgattcatgattcaagctaaatggggtatgaaactaaaggtggatcctctccaaatacccacaggtgacatggtccaggtacagccaactcctagggaaaggtgtctggaaaagggataccacactgaggttctcacacaggcagcttcctcagctgagaggggacacagaggtgttcaagggaaaggctacctgctgaagaggaagagaagccttggcagggggcacccctgatctcccagacaacagattctggtgtcacagattgtcactccctggccgattcctgaaccaggcccaacgaactgtccttacctctgcatccactcccagcgccccactgcaatgccgtgcacacgctctgcccttctgcatccactcccgtctccccactgcaatgcaatgcacatgccctgcccttctgcatccactcctgtctccccactgcaatgccgtgcacacgcccctgcccttctgcatccactcctggcacccccactgcaatgccatgcacacgctctgcccttttgcatccactcccggtgccccactgcaaagcgatgcacatgccctgcccttctgcatccactcctggcacccccactgcaatgctgtgcacacgccctgcccgtctgcatccaccacaggctccccactgcaatgcgatgcacacaccctgcccttctgcatccactcctggcacccccactgcaatgccgtgcacatgcccctgcccttttgcatccactcccgtctccccactgcaatgccgtgcacacaccctgcccttctgcatccactcccggtgccccactgcaatgctgtgcataaactctgctcttctgcatctgcagctcccttgccagaaatgcctggctgttttctattcctctgcagataccttttcacattcttagagctggctgaaatgtcaccagcaccagaaggtgagctccatggttttgtcttcttcagcatagaacccactgtgcctcaaacaacacctggcacagagtaggtgcccaatacatatttgaggaaggccaacaggaaggagcaaacagactctccaggaagagcaagtcgctcagtggtcaggttcctgggtcttggggacagtgcatgctcattgatttggggtcctctctgtgcatgtctgcctctctctggagctgtgaactccaccagcttctgttagtatagatggctcagtggacaagaagagtgtgaccctgtctttgagctgatatatgaaaatgagtggcttcacaagtatccaggacctagttgatatgatttaatgcaagtcagaagaacacgtttctactaaccaccactgatagtggccaattcatgtggtcacattagaaagatccatccttctgccactcaaatatttcttttgtcattgttggcatggcagatctttttcgatctttgtactttttttttttttttgagagacagtctcactctatttattgcccatgctggagtgctgtggtgcgatctcggctcactgcaacctccacttctcgggttcaagcgagtctcctgtctcagcctcccaagcagctggaattacaggcatgtgccaccatgcccggctaagttttgtatttttagtagagacggggtttcaccatgttggtcaggctggtctcaaactcctgacctcgagtaatcggcccgcctcagtctcccaaagtgctgggattacaggcgtgagccaccgcgcccgggccatctttgtgctttctacttttcttcttcttatgcttaaggtgtgtctcaacatctagttggattttggttatttatgcagtatgacaatttttgtagtttgatggcagtatttagtctatttacatttcatctaattacttatatatttgaatttaaatctacagtgtttctacttctttttctatttgtctcacttattttatgttccttttgttctatttgcctttttttgcaaataaggtgaagaaaaaggaggtgaagaaaaacattttttggccaggcacagtggctcatgcctgtaatcccagcactttgggagcccaaggtgggtggatcacccgaggtcaggagtttgagaccagcctgaccaacatggtgaaaccttgtctctactaaatacaaaaaaaaaaaaaaattagccaagagtggcgttgcatgcctgtaatcccagctacttgggaggctcaggcaggagaattgcttgatcctgggaggtggagattgcagtgagctgagattgtgccattacactccagcctgggtgacaagagtgaaaactccatcataaaaaaaaggaaggaaggaaggaaagaaagaaagagaaagaaagaaaaattttttaaatgtcatttcccccttttttagcttgttagtgattatatatatatatatatagtgattatatatatagtgattatatatatataatatatatatatttatatatattatatatatataatatatatatatttatatatattatatatatataatatatatatatatatatttttttttttttaccattcctttactagttatgctatagttatgctatggactggactgcattcccccaaaattcatatgtgaaggcctaatccccagtgtgactgtatttggagataaggcctttatggatgtcattaaagttaaatgaggtcacaaggatagggccctggtccaataggattaacgtccttataagaaggggctccagagagcacgctctgtcccgaccttcatctcccctctctctgccacatgaggacacagcaaggaggtggacatctgcaagtcagaacaagagccctccccagaatctgatcttgctgggattcacatcttggacttcccagcctctagaattgtgaaaagtaaatttctgttgtttaagccacccagtctgtggtattttgttaatgcatcccaagaaaactaagatcatgagatgcatccttaacttattaaaatctaaaattaatgagtaatttttaccatttagtcaacaatgcaaggaccttaacatggcttataaccctctatttactccctctcacttttttttctattgtaatgcattttaattcttatgtacaggctaggcacggtggcttacacctgtaatcccagcactttgggaggccaaggtgggtggatcacttgatgtcaggagttggaaaccagcctggccaacatggtaaaaccctgtctctactaaaaatacaaaaattacccagatgtgatgggtgtgcctatagtcccagctactccagccggatttggtgggcacacctgtagtcccactgcactccagcctgagtgacagaccaagacttcacctcaaaaaaaaaaaaaggaagaaaaattgtatatttggttaaaaataaaaccggaaaaaacattatttttgtcaatcttcattaagatttatccatttatttaccctctctgctgcatattacattccattccttcctgcctttctaaagttccatctgtcattttctttctgcctgaaatatttcctttagtatttcttttagtgcacagttactaatgacaagtgctctcatttttgtccatttaaaaatatcctcatttgacttgcattcttaataagtatttttactggttatagaattctagattggcttttcaacactaaaatgtcattccactggcttctggcttccatggttcctgttgaaaagttagctgtcagtcttattgtagttccagtaagggtaatctgtcattttagttggatgcatttaagattatctctctcttattattttgttttcaatagttttactgtaatgtgcctatgagtgattttctctgtattcataatactacaatactgcagggcttcttggatctgtgattcatgtctttcatcaattttggggaattcctggccattatctattcaaatattgcttctgttttattatctctctccttttcctcttcttctgggacttcaattatacttatgatagtattatgttcaatatgtgatataccatttctgtattttccatctatttgtctctgttttcagtccaaatagtttcttctgatgtatctttcaaatcactaattatctcttcatctgtgtctaagatgctttaaattcatctaatgtgtccttaatttcagttatattttttggttatagaacatccattgattcttttttatatatttccattctcaattgaaattctccactttgtcttttgtctccttgaattatcaatcagaggttattctaaagtttgtgtctgatacctccaataactaggtttcctgtaggtcagttgctattttctttctttctttctctttctttctttctttctctctctttccttctttctttctttcttccttcctttctttcttcctttctttcccttttctttctttctttttctttcttttttttttttcaaggtctcactttgttgcctaggctggagtgcagtggtgcaatgacagttcactgcagcctccatctcccaggcccaagtgatcctcccacctcagcttcccaagtagcacacccagactacagatgtgcaccaccacacactgatttttttttaactttctgtagaggtgggggtctcactatgttgcccaggctggtctcgaactcctggcctctagtgatcctcctacctcacctctcaaagtattgggattataggtgtaagccaccatgccaagcctgttttctatttattctcttggttttgagtcatttggtcttgtcttctgatatgcctcatatattttgaacaaatgctgcatgttttgtatgaaaaattgtagaaccaatgtgatgctgtagatgatggtatctttctccagagagtttattttgcttttgtcaagcagttagtatagaggcagagcatcttaatctgatttgaataaaagctgaatcttttttgagagttgatcagaggctgtaaccaaaagcctagggtattaccagagcctttctgagactgccaaagctttgcccagcttcttagcctttaaatcactgctcctagaagcaaatgcctggaggggaagaacagtgccaaatgttaggctcatctttctaggtttccctttctctaggatcttcccctctcaagtcctcactgtctggatagctctctgattttatttatttatttttttcatggccaggtctcattctgtcgcccaggctagggtgtagtggcactatcttggctcactgcaacctctgcctcctggattcaagcgattctcctgcttaagcctcccaagtagctggaactacaggtacatgtcaccaggtctagctaatttttgtatttttagtagagatggggtttcagcatgttgcccaggctggtctcaaactcctggactcaaatgatccaccccacttggcctcccaaagtgttgggattacaagcatgagccaccatgcctggccagtctctgatattttaaaacagatttttaaaattatctaactgttccagttgtttaaggtgggaagtttcatttgatccagactggcgttccagagccagaagaagagatctcaactgttcctttagcataattcctcacctataatgatggttagcataaaaattaaggtttagggtattggctttgaattcataaattccatctgggtgggtttaaaaagtataagttggttaaactggttggaaagagtggaaaattatagttctctgttaagataaattgttctaactaaattagtataagaagcgtttgagcagtcactggaaacatacaatacatcccagttaactttccggtactttttctcttagtgaagtatacgtttgttttatagcagcaagaattagggatgcttctagccttctcagccttctgtcaggctctgggtcatcttgtagtatgcttgttaggtccctaagaagacactgtgtttgcctctctgtttatgcctcaggtaaacccattcaataaacatatagcaatcacatttaaagattctcatcttacttatccaaaagtttcagaaattgtccttttaaagtacaaacatccataaaaaccgagaagatgggccgggtgtggtggttcacgcctataatcccagcactttgggaggccgagacgagcagatcacctgaggtcaggactttgagaccagcctggccaacatggcaaaaccctgtctctactaaaaatacaaaaaaattagccagccatggtggcgcatgcctctaatcccagctacttgggaagctgaggcaacagaatcacttgaaccgggaagtgaaggttgcagtgagccaagatcgtgccactgcgctccaacctgggtgacagagggggactctgtctcaaaaaaaaaaaaaaaaaaaaatccctgagaagaagaaaagaataaacagaacacacacacaaataattttgcacagcagagtggagaggtgatacagccagccacttgtcaaataactacagctgttgcaagcttgatcttggcaggttgttcatgccacatggggaaaagggccttcaaagcacaaagttcgacccattctggcagagtatcaggatgaactagttaacctgaaggccaggctgcatgctggacaagaacagctgggaaggctgagggcatctactgcaggcactcacgttttgaagcacaagtaggttttattaccaaggctgtgcatagccaccagcgaaagtataggtaaggctgcttagtgaactgctttgggaactgaatgagcagaaacgaatctgtgagccctagagactatcctctaaaaaggccatggactgattgtatgataatgtttgggcctctgaacacaagtgggagattcaagaccagccactcaaatcagattgcttcagttaataaaataagggacaatgacaggaagtacatggtgtgggggctggtcctctcaactccttggagagacacacagaagaaaaaaaatggttttagctaggctataatcacagaatctgttaggactaaacggatcctccttgtagatagagtctaacgttaaccaccttatgttacagatgaacagacaccatgccgaaaactccttttcacctgccagtcctcatatcaaacactcattcttcggcaaaggcttccctgcttccatttggtggctctatccttcattcatttattttctttatttttcttctttttttgttttagagggagtcttactctgtcgcccaggctggagtgcaatggcacgatctcggctcactgcaacctccacctccccagttcaagtgattctcctgcctcagcctccctagtagctgggattacaggcatctgctaccatgcccagctaatttttgtgttttttagtagagatggggtttcatcatgttggccaggctggtcttgaactcctgacctcaggtgatccaccctcttcaacctcccaaagtgctgggattacaagcgtgagccatagcgcctggccttcttcattattttctaatctcaagtgtgagctccatcatttcaggagctcaagaaaacaaaaggtcctcaatatcatttgctgaagggacacatgagaaggggtatctgcaaagtgcactgagtctccattgtcctgagccccagcccaggcaattcagccagactccaatagcagttcaaaagtttcagaacactctgaaaaaacaatttaaacatgatatgaaatatagagaataacagaatgacccaccatgtacacattactaatgccccatcattttcccatctatatcttcacacacttcccttgccccatctaaaactacttacacacaaatcccagatatcctatcattccctctaaatattttatcctgtattttcagaagataattttaaaaataccaccataatattaccgtttctaaaaaatttaagaagacttttaaaatatcaaatatcccatcagtattgaaattcacaagtgtcctaaaaacgttagtttttttttctttttatcatttgtttgattcagaatctaaatgtgattattttccttgcaattcattattgaagaactgggtcgtttatcctgcggttttacaagagctggattgttttgattatgtccccatagtgctgtttaacatgttcccctgcagttttcatttcatgtaaattagtacaggagtccccccccatcctccaggatatattccaagacccccagtggctgcctgaaatcatggacaatagcaaaccctacatactgtagagtatgtttcttcatatatatatatatatatatgaatgataaagtttaatttataaactaggcacagtaaaagattaacaacagtaactaggcacagcaagagattaacagcaataactaataataaaatagaacaattacaacaatgcactgtaataagagttacgtgaatgtggatgtagtaacccagacgggtattgagtgactaatgggcaggtggtatggacagtgtagatacacaaggggatgatcgcatcagggtggtggagtggcttcgttgtctggggtaaatacttgaggttcattgcctcataccaaggaaatcaaggatccagatgtatgtgaaatgaggttaacagcggaggtttaataggcaaaagaaagagaaaagagaatagcactctctcccacaagagacggggcgggggggaaggggcggggcggggaggggcggggcggggcggggggccggccggcagccctggaggagtgcactggatttcatagataagcttgaggaggcggtgtccgatttacatcgggcccaaagattggttggactaggtgtgatgtttacataactcgcagggaagccggctaccccaccctaatctttttttttattttagacagagtcttgctgtgttgcccaggctggagcgcagtggcgcagtcttggctcactgcaacctcccaggttcaagcaattctccggcctcagcctcccaggtagctgggattacaggcgaccaccactaggcctggctaatttttgtatttttaatagagacggggtttcaccacgttggccaagcttgtcttgaactcctgaatgcaggcgacacctcctcccccggccctcagcttcccaaagtgctgggattataggcttgagccacctcgcccagcccaccccaccctaatcttattatgtaaatggggtctttgcttggccggggttatgttgcctgctccttggtgtacacatgtctggcaaagagaagggaagattgagccgcctttttgaacatgcctagtcccaggtagccttttcctattggcacagctgctggcattcacccgtgcaagcttctagcttgcttgtctatgtctgcagctcgattttacaggctgctctttgttagaaaagaaaatgatttgggggctgctttccattaaaaggaaaaccttaccaaggacttccttaccctcactatctgcctaaatcatttcttcttaactcccctatcagtgggacagagcgggccagcaggagatttcattgtgctattcagaatggcacgaaatttaaaacttacaaattttttttctgtaattttccatttactatttttagactgcggttgacttgggtaactgaaatcaaagcaagacggtgggtaggggggaccactgtggttgatctcagtggtctagacaccttttgggacccctcagagctccatatatcaaacctgaatctgatcattcatgggggttcagtggggccccaagagatgtctagaccacctcatagttgatgctgagtttttttatttcaaggcatataatgtggggaaatggagtgatctctttttctgatgtcagcagccactgctaatcgtgcctacatccattcattcatcagggatgcaaaatagtgatattctgtctattgattcttcctcacttaatagctggaaatactttaggagaaatacccatctcagataccgtgtggccaccaaagcccaattttaacacaattgtaaccaagacaatgctttctctccttacagtcctctgcaggaggttgagcgactttaagcaaacctttttttttttttttttgagatagagttttgctgctgtagcccaggctggagtgcaatggtgtgatgtcggctcactacaacatctgcctccagcgttcaagcgattctcctgcctcagcctcctatgtagctgggattacaggcacgtgccactaagcccagctaattttttgtatttttagtagagacagggtttcaccatgttggccatgctggtcttgaacacctgacctcaggtcatccgcccacctcggcctcccagagtgctggggttacaggcatgagtcactatttattttctagccaagaactgactggcagaggtgggcccgacagctgtgggaaacacattcttgcctggttctctcccggccagtcagctgaagcagaggccctgcctacccagagattttctcaaagcagcacggctccagggcctgctctaaaggtctggcctttctctttgaaaatgttttctcctgtaattaagggattttctaacttgagcaatagattaaaattcatcaaaattatattttcagaaagccataaacctgaagctactaaggtctggctccaggaaatcctgaatccaggaaggatgctcagcgggacagaattgaagacaatagttcatcatctttccttcccaggatcgagaatatcccaaggaaatgccaagtaaaaaagtaaaatcagcgattgattttgcgtttggagaactgaccacgtttcttgatcaaatgccgattgcaagtctgagtcaaggttgagcatataaaggaatcctcccgggtacctccccttggggtcttcacatgatgtgattttgaaaaaccagactcgggcgatcagagacctcactgcggaggaaatgaaggatgcctcgcttccaatacctggctcccatgaacactccctcgggtccctgctagcgccagcctgagacagagagcgcttcctgtcctgctgactgcagaagttaaacggaatctccactcccggattgaggaaagaaaggcgtcttcctgttgattttcgcgaggctgctgaccttcgcggcgccccgactgggcccaccccgcggagctgtcggggcagcaggcgcccaggacttcctgaatccccggcccctctggcctaacctagatctcccaggactcaggcctgggaaaatcacggcgtctgccaggccctcctcgcaggctttgcagtttgctaactcgcggtgcggccttgggacagtgcctcagtttccccaagtgtagtgaagtagggctggaccgtgattctcagaatcacccaagaagcttttccagcatcgcctgccagggtgtccctggggacccaccggatcggagagggggtcgggggcgaaaagcgccaggaggctggcagcccgggctggaacccgggactcgggctcgcccgcctcggcagctactccacggtctgcctggccccggagctcgccttcggcctgggcggggtcttgcgcgtctccgggccggttccgggaggccgggcggggcggggcgggccgggctgggttgtcccaccggaaagactcgtttcagctggagcaggcggcggccgggcggaaacagacttgtcgcccccgcctcgggcactccccgctcccccaccccaccaccctccccccccgccctgcgcggcccgccagggtccgggaatcgctggcctgcagctggggcagccccgggtcacccccgcccacgccttccccgcccacaggacgcgccccctaggccacacctgagctcgccctgcggtcccgggcagtgactccgccgagcctcggtgggggaggggacaggggagagaatagggaagaggggcgcgatctgtgtctgggacccgttgccaagaaacccgaccctcgggctctggccatcagcagccgcggtgcagctgcctccccctgcctccaggtcgcccagcagagctttctagagctgggtgctcagaagaccccaggcggaggcaagaaccttgggccgcggctctgtgggaaaagccctcggggaagccagacggcgcgctccagctccccatcgcgggcgtgggccccggggtggaggcagttgggtcgcggccctgccacccccatgctgcacggcctcggcccagtgccaccacctctgtgggccgccgtttcagcctccagatggggtggcggcgggccccagcccttgccccaagtctctaaggaagggtctggcctggcccgcccagatccgagctgctgcgtacgcgcggggctgggagctgcaaaaacgcccggggcccagggtgagcggctgggccctcgggggacccggcgcgcgcgggggctccagctccgccctgttgggggccagagcaggagggaggccgccccagcttgttctgggccgcagccctgccgaccgcacgggacaggcgccgcgtcctctctgggcctccaagacgcagactagaagcccatagctgctgggaagatgggcaccccaggtctccgcgcacggccttcccagggccacggtgaaacatggatgcgacactcaggcaccttcccggcccccggcgaaaacgcaaagcctgagcccatgatgggctcggaagctctgcgggattgagtcatcagaggaatgctgatctagaagtacaatggctggaagacacccgcagaaaccgcgggcactggagagcaagtgcagctttaatctccaggcgtgatttagatggaaagcagcctgaagaccagttaagagaaccgcgagcagagcgcgctggactagcaccaacagacgtgagttcgagaccgtcctgccccttaatcctgtgtgaccttggtccattttttaagtctgtgagcctcgcagtgttctcattcctgaaaagagcctgccccatctccggactgcagtgagaacaaaaggagactatgaacatgactttttgccacttttgaagccccacactgaggaaagattttcctagcacttgggagattttctttagcaccagctgccaagaatgctgggaaggagacagccccatcccagaaggaagacaccttaaatcagaactttatttttcctcctatgaaaatacaatctaatactggagaagtgtaaaaattaaggagtcattagaagccatttgttgttgttgttgttgttattgttttgagacaggatcttactctgtcacccaggctggagtgaggtggcacgatcattgctcactgtagcctccaactcctggactcaaacaatcctcccttctcggcctcccaagtacctgggacgagaggtgcactgggcgtggtagcacacatctgtagtcccaggtactttagaagccgagaagggaggtctcactattttgcccaggctggtctccaactcctgggatcaagccatcctcttgcctcggcttcccaaagtgttgggattataggtgtgagccaccactcccagcctgttgttttaactttctatcaaagaaatggatggagggtggacagggatgctgggtgctttagattagacttgaaagagttaacagcataggttacagaatcacacatacccgaattggaatctcatcttgaccctttactaccactgtttcgttatgttagtgacttaacctctctgtgcttcagtttcttcatctgtaaaatgaagaaaatggcaccaacctgtggggttgttgagaagatgaaatgcaatagtgaatgtaaaagtgcctgacaggacccagcacgtggtaatacataataaatgctagctagttttggtttccatccttccttcctaccaatttttattgtaaaatatttttaaacatgcggaagagttgaaagaatcatacagtgaacacccacgcatgttccacctagcttctgcattaacatttttactctatttgctctatcacatatctgtccatctagctttctttccctctatccatatatcaatccatctgttctggttactactgttatgtaacaaattcctcaaaacttcgtgacttgaaaaaaacagccatttttgtcatgctcatggatttcatgagttagaaattcagacagattggcttgttgctgctctaggacgtctggggtctcagctcggaggacttgatgcctgcaggctggaatcgtcctgaggcatcttcacgcacatgtctgggggttgccagcatcgtgcctgcgtgtgatctcatcatgaagctcagacttcctcccagcatggtagcctcaaggtagctgaacttctcccagggcggctcagagctccgagagtgtgttctggcaaacaaggcagaagttgcagtgcctttataacccagccttgcaagttacatagcattgcttcctgttggtcaaagcagccatagattcaaataggggagaattaggttccacctcttgctggtgatgtgggaggctcattttgtagatctgtggcacaggaactgttgtggccatctttggagatgccacatttacccctttggtcacaataatgcttgtgcaatatgcacaaattctcattccatgaaatcatcaggctcagagtccaagattcctttttattgttgttgttggcttttgttttttagagatagggtcttgctctgttgtccagattggagtgcagtggtgccatcatagctcatttgagcctgcaacttctgctccagtgatcctcccacctcagcctcctgaatagctgggactgcacacatgcaccaccacacccatctaatttggtttttattttgcagagacaggggtctcgctatgttgcccgggctggttttgaacatctggcctcaagcaaccttcccaccttgacctcccaaagtgctgggactacagatgtgagccaataaaccacttcaaaataaacctttcttgtccgggcgaggtagctcacacttgtaatcccagcacaccaggaggccgaggtgggtggattacctgaggttgagcaacaaggagaaaccacgtctgcactaaaaatacaaaaattagctgggtgtggtggtgtgcgcctgtaatcgcagctacttgggaggctgaagcaggagaatcacttgaacctaggaggcagagtttgcaatgagctgagatcacgccactgcactccagcctgggcaacagagcgagactctgtctcaaaaaaaacccaaaaactaaaataagcctttctctcttttgggttccccatgaaattgctgtgggacaatgcccttaagattcctagaagttggttgggcgcagtggctcacgcttgtaatcccagcactttgggaggctgaggtgggtggatcacctgaggtcaggagtttgagaccaacccggccaacatggtgaaaccctgtctctactgaaaatacaaagaattagctgggcatcggggcagatgcctgtaatcccagttactcaggaggctgaggcaggagaattgcttgaacctgggaggcagaggttgcagtgaactgagatcccaggctatgcactccagcctgggagacagagcaaaacttagtctcaaaaaaaaaaaaaaaaaaaaagattcttagaagtcctattgtttaacacagaggatctacaaagtatgctgttagtttccttaagaggctttttgtctggttgaaagggtctacaaggcaccaccataaaattttctcatatcttaaagaagaactttacagtggggcacttggttcacccttaccctgagctgctttcctaacagtgccctgggtctgatctttgccctttttgaatcttccactgggagaaacgtggaatgagaaacagttttttgttttgttttgttttttgagacagggtcccactatgtcacccaggctggagtgcagtggtgcaatcgtagttcgttgcagcctcaaccttctgtgcttaagcgatcctcctgcctcagcctcccaagtagctgggactacaagtgcacgtcaccatgcctaactttttaaaaaatgtattgtaaagaacattttttaaatttttatttttattttttattttttgtagctatgttgctcaaactggtctcaaatgcctgggctcaagcaatccacccgccttggcctcccaaaacgctgggatgacatatgtgagatactgtgcccagctgagaaatagtttttgaatccacctggtcccgacttctaaattctgcctgaagctgaatatttctttctcttcctctacgatacagagctaagagaaaacaaatggtagctcaggactctgcttggaaatctagaaatagctggaggctgggctaggacaacttgaaaattaagacaagcaaatggaggaatttcatgtggcttatcaatgaagttggcatcatgacttcatggtgcctcaagatagtcagacttcttaccggatggttcagggctccaatcacaagtgttccagtgagtaaaacggaagtgtcaggaacttttctggcgcatgcttataaggtacacagtatcacttccatgtaactctgctggcagttgagtgactgttccactcaacactgatggcagtcacacgcccatctagattcaaggagaggggaattagactctatgtctagaaaggggagtgtcacgattacatttagcagaacacgtgggaacggagatgttgttgtagtcatttttggaaaatacaatctgccccactgtccatgttttgatgcatttcagagtactttatagacatcattacacttccccaaaattcaccaaaaatgtgtgagagtttcgactgccctcgttctcacccgcaaatggagctgagggccatttacattttaatcattctggttggtgggtagcagtatctcattgtggttttaatttgcatttcccagataactaaagatattgaatagtttttcatgttcttatacaccactcatatcttccttggtgaagtatcttttcaaatctttggcccattttttggactttatttattgatctttttttttttttagagagacactctttggctcaagtgatcctcccacctcagcctcctgagtaggtgggaccacgggcacatgccaccatgcccagctaaatttttttttatcttttgtagagataggggcatctgtatgttgcctaggctggtcttgaactcctggtctcaagcgatccttccactcggcctcccaaagtgctgggattacaaatgtaagccaaaatgcccagcttgagatttttttttttttttccaaatggaaatccagttggtccagtacaatttgttcatgagtttcctttccctgttggattgcattatgtttgtcaaaaatcagatggctggccaggcgcagtggctcatgcctgtaaatcccagtactttgagaggccgaggtgggaggatcccttgagcccaggagttcaagaccagcgtgggcaacatagtaagaccccatctttttttttttaataaaaaaaatcaaatggctgtattcataaatatgtgtttctgggttctctatgctgttcgttgatctatttattcctcctattgctggtcccacactgtcttgattactgtaatcttacagtaaatcttgaagttctcgttcctttttgagtaagatgattcctttttaatggacaaaatattgctgacttctacatagctgttgcatttctagcatgttgatttagcaaataaaagtagtaaaaagaacttgtgaacacctgaaaatgaccttggatcttagtgatcacaatgacaactacagatatctagaaatctgtcacctatgcacaggtggacatcacatggggatgtgtgatggccctgaggtgaccacgtattcctcagcaggaaaacggggtgtttttctgctgctggaatcactgatagccatcaatttaggtgagattcccaaagcagtggatttcttttcaacaggaagataatcagttgagttttccaatttgtccatgtgaggtttcttccagactgagcaagatacacagggatgagagaaggtactctatgggatttagtctttcccaggagacactggattggatgtcccaagaggaccgttatgagttgtgtgtcccgcaaattcatgttttagtcctcacccctactgtctcagaatataacctcatttggaaataaggtgtgtctgagtctgttcttgcactgctataaagaaatacccgagactaggtaatttataaagaaaagaggtttaattggctcacagttctgaaggctgaacaggaagcatggctgggaaggccttgggaaacttacaatcatggcagaaggcaaaggagaagcaggcacatcttccacggcaggagcaggaggaagagagaatgaggcgggaggtgctacgcacttttacataaacagatgtcttgagaactcactgtacagtaccaagggggagggtgctaaactattggtgagaactccacgcccatgatccaatcacttcccacctggccccacctccaacactggggactacaatttaacgtgagatttggagggaaacagatccaaaccatatcaaggtggttgcagatgtaaaatgaggtcatgtgcactgtgaccttatgaaaagaggacacagagacagacatgcatagagggaagattctatgaagatatttggagaacaccctcttcaagccaaggagggcctcagactgcaagaaacaggacagaggcatagaaaagaactttcctcagccctcagaaggaaccgcctattgtgctgacaccttgacttctgatttctggtctccagaatggaaacaatacatttctgttttttgttttgaaacagggttttgctctgtcgcccaggctggggtgcagtggcatgatctcggctcactgcacctccacctcccaggctcaaatgatcctcccacctcagcctcccaagtagctgggactacaggcgcaggccaccaagcacggctaattttttatttttatttttgaagagacagggtttcgccatgttgcccagcctggtctcgaactcctgggttcaagcgatcctcctgcctcagtctcccaaagtgctggggttacatgtgtgagacaccacacgtggccacatttctgtgttttaagcaactcattctgtgttatgacagccctcagaaacaaatacaagtccccagccgtctgctgtccgccacgcatgcctggccttcgatgggcaacgaggtcccacttttccctctgggacccacctctttcctattgcatgtggctcgtgggaagtcaaccccagtgcccactgcctggcaaagggttcagctcaatgcccagctcctgctaggagtctcgagttttgagtggagggacctggggtgtacaatgctttgtgctgagccattctaatggcagtacccccaaatcctgcttgcacccccacatcctcagatcaccttggttcctaatctacccaaggctgactgtctagcttttgtgttgtcccatgtcctttcaataacaataatgattattctgatttgctaatgttagccagcgctggcttctgttacctgcaacaaaaatccccagttgaccccgtcatgcccttggcctcggctcggttcttcttctctcctgtctaaaagccattaggtggagccaaggaaaacaggcactgttgcagggtggaggtgggcagtgccagtgccggcagcctggcacggaacaccggagcccagcagggtaaaggaaattggtgaaatctggtgtgggattctggagcccagtgagatgaggaggatgcactgggaggtggcaggggcggggctgggtagctgccccagcccagcacagggcattgcaacaaaagcaggaagagcggggagtccagtgtgaaaaagtagtctcagttggatgaggcggtgactgcacggagtggagtaggggtgggaggtggtgctgtgcgggttgtttgatcccaaaggggatatgacccgagagaccaaagttgatgcccctttatcaactaagacggaccctaaggttaaggaaacaaaagttacctatgggtcgagggttcagggcctggctgacacggcaaatttctaaattcctaccattacaagaaaaaccacactcttgctacgctccttaacgataggagctatcgggcaaattatcagctgatttacagatcagatcactacaactctgattggacagaggaccagccttacaaacattctcttctgataagcaacttcaccttaggccagtctcagcagctgatagaggctgtgcacaaactgtctcggcatcttatagttcactttttgatgtaaggggctaaattccatctcgttttaatcctaaaaccccatttcaaagtgaacatgggatatatgttacatacacataccacatactacatcatatacatacatacatacttttcttcttttttttttttttttttttttgagaccaagtctcactctgtcgcccaggctggagtgcagtggtgcgatgtcagctcactgcaacctccgcgtcccagattcaagcaattctccctgcatcagcctcctgagtagctgggattacaggcgcccaccaccatgcccggataatttttgtattctttagtagagatagggttttgccatgttggccaggctggtcttgaactcctgacctcaggtgatccgcccacctcagcctcccaaagtactgggattacaggcgtgagctaccacgcccagcccataaatacttttctaagtgaaagtttacagtgtgttagaagaacatttttctttcctcattgggccctcatagttccatagaaacatccaacaataaaaggcaaattgaatcatgttttctttcaaatgcatcataaactattttccttcagtgaatggaagagtttggcagaggaattttaaagaaaacattgagaagaagttattagaacatgtttctttgtccaataggtgctgaaaggcccgtagagaaatccactcataaccgagtacagtggctcacacatgtaatcccagcactttgggaggctgaggtgggtggattgcttgagcctaggaattcaagaccagcctgggcaacatagtaagatcctatctctaccaaacaaacaaataaaacaaagtattagccgggtgtggtggcatgtgcatgtagtcccagctactcaggaggctgaggtgggaggaacatttgagcccaggaggccgaggctccatgtgagacatgttcgtgccactgcactctagccggggtgacagagtgaaaaaaaaaaaatgagagaaatccatctattgcacatgaactcagctcccctcagaaatatatatcgttttttcctccagcttgctgaatacataggactctattgtgtgatacagaccctgtgaggcataaaacccaacctgccccttccctcattaaagagaggacaccttctgcacatgccagagatggtctcttcccggtttgcaaactgataccatcaataaagctctcctttctacatttatttatttatttatttatttatttgagacagagtcttgctctgtcacccaggctggagcacattggtgtgatcttagctcactgcaacctccgcctcccaggttcaagtggttctcctgcctcagcctcctgcatagctgggattacaggcacgtgccaccacacccggctaatttttgtatttttagtggagacggggtttcaccatgttggccaggctggtcttgaactcctgacctcaggtgatctactgtcatcggcctcccaaagtgctgggattacaggcatgagccacagcgcccatccttctttctactctttagcaatcctggtggtcatttggacgacatggatgaggagggtatctgtgtgggaacaggggcagcaattggttgcatacagaggacttcaatctaatacataaatatatgggtgtaatgagagctgggtttctcacagttaaaaaggggagtttcaaatatagaaagggaggaaaaccctaaaatgaaaccattatgggctgaattctatcctcccaaaattcatgttgatgtcttgaccccaagtatctcagaatgtgagggtatttggagatagagcattgaaaggggtgattagattgaaatgaaataattaggcaggccttaattcaatttgactgatatgcttataagaagagaaggtgaggacaaacagagagaccccagaggcatgcatatacacagggacaaccacgtgaagaggtagcaagagagtggccatatgccagccaaggagagaggcttcaggataaaccaaccctgctggtaccttgatcttggacttccagcctctggaactgtgagaagagaaatgtctgttgtttaagccatgcagtctgtggcattttgttatggcagccctagcaaattaacacagaatcttttaggattagatgaaaattggagttatcagtgtagattcatggttttcaatgtacatataaatagatgtaaaaataaatgtagatagaaatgtgaatgtacatatataaatgtatgcattatgcatatttgcataaatattatacacaaacatacactcatgtatttcctacttctgttcactgagagcccctggaagcagtgactccccaaaagccatgagctcatctagtgtccaaatcttgttttctttcattctttccttttttaagagacagagtcttcctttgtcacccagactggagtgtgttggcaccatcttagctcactgcagccttgacctccaggggctcaagtgatcctcccatctcagcctaccaaagcactgggatgataggtggtatagtttggttgtgcccccacccaaatctcattttgaattttagctcccataatccccaagtgtcatgggagggacgaggcagagataattgaatcatgggggcagtttcccccatcctgtttctgtaatagtgaattagttctcacgtgttctgatgtttttataaggggcttcccccttggctgggcactcattctgtctcctgccgccctgtagggaggtgccttccgccatgattgtaagtttcttgaggtctccccagccatgcagaactgtgagtcagttaaacctctttcctttataaattacccagtcttggatatgtctttattagcagcatgagaacgaactaatacaatagacatgagccaccatacccagaccagatcttgttttctaaatatcagtctccactaaaagagccgagcagggatagtaaagatgagctttaaacatcttcttgtagaagattaagaaagtgcttataggatgatggaggcatgtcaaaaggacacagagcagctcccactgaccacatctggggcaattataaaccactaagaaaaatacaaatccatgagtccatactcctataaataaataattgtggggagaaacagcagaatgcttccctgcagtagaatgccaagtgtataaggaatcatggggtgagaaaatcatcatctcgttacctccacagcaataactaattaatccaagaatcatcaatgtaggcttaaactagtgggtagaggcttgatgaggaacaagatatttagtctcaaaggcacctcctcacaaaatgtttattaattacaaagctaaaaagagtgatttggtagtaaagaggcttggcaggtacagatatgtcttcatcaagttaacatcatcagtaacaggagaaattggaaatgtgtgccatctggtaagaagagcagagcctcacctctcggatattcctgcccaaaatacataacctgaatctaaacacgaggagacatcagtcaaaccaaacgagggacaaacaaactggccggtaatcttcaaaataactacaaaataactacaaaaactggctggtaatctacaaaataactggctggtaatcttcaaaagtaccaaggtcaaggagagactgaaaacagttcagactgaaaactaagagatgtgacaattcaatgcatcacgttttcctagactcaatccttctgctcttgaaacaactaattacattggaatgaggtctaaggagatgctagttatgtatcaatgttaattttctaattttagtcacgtattgtggttatttagtataatctccttgtttgtaagaaatacacattcaaatattagaaagtgggccgggcgcagtggctcacctgtaatcccagccctttgggaggcctaggtgggtggatcacctgaggtcaggagttcgagaccagcctggccaacatggtgaaaccccatctctactaaaaatacaaaaattagttgggcgtggtggtgggcgcctgtaatcccagctactcaggaggctgaggcaggagaatcacttgaacctggcaggtggaggttgtagtgagctgagatagtgccactgcacttcagcctgggtgacagagtgagattcggtctcaaaaaaaaaaaaaaccagaaaaaagccaacaacttattctcatacttttcaagaataagggggtctttgtactatatgtacttgcaacttttatgtaggtttaaaattatttaaaaataaaaattatctttaaaattatctaaaaactatccttagaagatacacagatggcaaataagcatatgaaaggatgttcaatgtcatttgtcattagggaaatgcaaatcaaagcaataatgcgatactactgcacacatattagaatggctaaaatccaaaaaactgacaataccaatggctggtgagagggtgcagagcaatgggaactcatacattgctggtgggattccaaaatgatacagctattttggaagacagattggcagtttcttacaaagctaagcacagttttaccatatgatctagcaatcatgctctgatatggcttggatgtttatcccctccaagtctcatgttcaaatataatcctcaatgttagaggtggggcctgatgggaggtgtttgggtcatggggacagatccatcatgaatggcttggtgccatgcttgcagtaatgagtgagttctcactctgagttcatgtgagatctggttgtttaaaagaatgtggcatctcctccctctctgtcttgctactgctcttaccatgtgacacaccagctccccctttgcttccaccatgattgtaagcttcccgaggccctcaccaggagcagataccagcaccatgcttctcctagagcctgcagaaccacgagccaattaaacctctttctttatacattacccagcctcaggtatttctttacagcaacacaagaatggactaacacaggctgctcagcatttacccaactgatttcaaaacatacgtctgcacaaacgtctgcatgtgaatatttagggtagatgtattcatgatcacccaaaatcataaacaactaagatgttcttcaataagcgaaaggataaagaaacagtggtccgtccattcagtgggatactacttagtgattaaaaaaaaagtgagccatgcaaaaaatatggatgactgttatatgcatattgctaagtgaaagaaaccaatccaaaaaggctatatgctataggatttcatttgtatgacattttgcaaaaggcaaaactttagagacagtaagcagttgccaggggttctaggaaggaggagacttgaatatgtgaagcacaggtggttttttagggtggtgaaactattctgggtaatactgtaatggtggatacattacattgcattatcaaatctgtagacctttacggcacaaagaggaacccttaattatgcaaattttaaaaaatcatttaggaggttggaggatcccaggaagaatgtagatggtaacaaaataatctacctgtattacaagggtatgaaataactttactgaaaaaggtagggtgaaaatagtgctgacctatgtaactatgaagataagtgaagacttaaggcaaaattttctgttggtctacaagtatcctaaatgaaagcattgatttaagattatctttagcatttgaaaagatttggtattctagtagagaaatcatcatcctttaggcccatcagttcctccggtcaccgtgctacacatttgggacgctagtagagggtcttgctagatggcagttatatcaaagagacatgggaacaaactgaaagaacttccaaaggcaaagatgaaacaatttcataaaccaagtaaatgacatagtgttagattataactcaaagtgtattatagatagccatgagtccatactaatataagtaaattattgaataagtaactaaatgggaaatagacaaatttttcatgcaggattctttttttttttttttttgaggcagggtctcactctgttgcccaggctggaatgcagtagtgcagtctcagctcactgcaatcttgtcctccttggctcaagtgctcctcctgcctgagtcccccaagtaactggaaccacaggcacatactaccatgcctgactaatttttgtattttttatagagatagggatttgccatgttgtccaggctggtctcctggagctcaagtgatccacccacctcggcctctcaaagtgctaggattagccccttgtgcggaggggtgaaatgcacttgggaagctctgctagtcagtgagacactgctgttgctgctgcccctggtcctgaagctgtccttcctccctgatgtacttgactaaggcacaagtataatctgctcctccatccctgaatgtggagatgcagtcatggctaagacgcagcctcactcaagaaatccctccagctttgtgtgatgcctgtaaaaaatgttttctgggtgcttcagaagtagactttaagattgctgccctcatgtattttttcctaatattttggcacgtatttgttgctttgcacaatcatctctgaaaatttcatcttttaaactctacctctagagacgcagcaaggcagcagtgtcattggttttctatgtaagaaaatcatctctgtattaaaaaaaataaaatagaccgggtgtggtggctcatgcctgtaatctcagcactttgggaggccaaggcaggagcattgctggagcccaggagttcaagaccatccagggcaacatagtgagaccctgtctctacaaaataataataattattattatttaaaaaaataaaggctgggcacagtggctcatgcctataatacctagcactttgggagcccgaggtgggtggatcacttgaggtcaggaattcacgaccaacctgaccaacatggtgaaaccccatctctactaaaaatacaaaaaattagccagtcatggtggtgggcacctgtaatcccagctactcagggggctgaggcaggagaactgcttgaacccgggaggcagagatggcagtgagccaagatcacgccgttgcactccagcctgggcaagaagagtgaaactccgtccccaaataaaataaaataaaataaaataaaataaaatggagttagtaaccaaccagtgttttctttgaggaaatccagagtaaggcagacacaacatctgtttctgtctcagacctgagctcctacctggtctcagcatggcttgagtcctatggattgccactggaagaagctccagataaaaatagcaaaagaataaagaaatggctcccgacctctggccttcttcaaaagctgatgagctaatggagaaaagctcggcaaaccaaaaacctccatgtgtgcccagttagagaagtggaaggccacctcttggctttagtaggaagcttgtggtggtttccagttcttacagaggagccacattactctcacagcagtattcttaggagtcaaccatggccaatgtcaccctctttttataggggggctgagattgggagggcagacaacctgcccactgccaggcacaggctatacgctgccactactactatcactatgactgctatttctgctactactacacactacggaaaggtggccttatcttctatttaggtttttagactagtcaaatgtactcccagatggatggattgatagaaagtttatattatttatttatttatttttgtagagatgaggttttgctctgttgcccaggctggagtgcagtagcacaatcatggctcacagcagcctcgacctcctaggcccaagcgatcctcccacctcagcctcccaagtagccgggactactggtgcacactaccacatccagctaatttttaagttttttctagagatggagtcttgctacgttgcccaggctggtcttgaactcctaggctcaagcgatcctctctccttggcctcccaaagtgctgggatcacaagtgtgaaccaccacacctggccaatttttttaaaaaacgggctttattttttagagcagttttgggcttgtagataaattaagtggaaaatacatacagttctcatatactccctcaccctcgcagtttcccctactactaacatactgcaacagtggctacatttgttggaattcatgagccaatattggtacattgtttacttcatttgttagaattcacagctcatattgatacattgatattaacaaaaatccatagtttacattagggttgactctgtgttgtacattctatgggttttcacatgtatccaccattatagtatcatacagaatagtttcactgctctaaccagcccccttcgtttctccctcactctctcttcctgtgaacaactgaaacattgatctttttactgtctccatagttttgcttttcccaaaatgtcatgcagttggaatcatacaatatgtacattttcaagttggcttctgtattagtcccttctcacactgctaataaagacatacctgagactgggtaatttataaaggaaaggggtttaatggactcacaattccacatggctggggaggcctcacaatcatggtgaaaggcaaaggagaggcaaagtcacatcttacatggcgccaggcaagagagcatgttcaggggaactcccatttataaaaccatcagatctcgtgagaactcattcactatcacgagaagaggatggggaaaactgcctccatgactcaattatctccacctggtccctcccatgacatgtggggattatgggaactacaattcaagatgagatttgagtggggacacagccaaaccatatcaacttctttcacttagaaataggcacttaagattcctccatgtcttttcatggctcgatagttcatttctttttattgctatataatattccattgtgtggttatacctcagtttgtttaaccattcaacctattgaaggataccttggttgtatctgagttctcccaattatgaatgaagctactataaacattcatgggcaagtttttgtgtggatgtaagtttccaactcatttggataaattacaaggagcaaattgctgaatcctgtggtgagagtatatttagtttgcattcccaccggaaatgaatgagagttccattgctccccattctcatcagcatttggtgttgttcgtgtcttgtgtttagccatcctaatggatgtgtagtgtagtgcactgctgtttagatgtgcaattctctgatgacatgaggttgagcatctttttgatatcttcttttgctttattttaacaagatgtctgttaaggtcttttatccatttttaaattgggttgttttcttattgttatttttaagaggttttttggggtgtgtgtgtgtgtatgtgtgtgtgtgtttgtattttttaatttttttagacagagtcttactctgttgcccaggctggagtgcagtggtgcgatctcggctcactacaacctccacctcccacgttcaagcaattctcctccctcagccttctgactagctgggattacaggtgtgagacaccatgcccagctaatttttgtatctttagcagagatggggtttcatcattttggccaggctggtcttgaactgctgacctcaagtgatctgccttggcctcccaaagtgctgggattacaggcatgagccaccacacccagcatttcttttttttttttttttttttttggaattctttctttaaaagatcacatttttggtgttgtatctaaaaggtcattgccaaactcaaggcacctgattttctttttcgttatcttctagttttactgtcttgcctcttacatttaggtttttttaattgcaaacctcaagggtggaaccagactatcaacatttggaatacttgaagtgaaaataataaataataatggaaggctggggttgaaaacacaagcatggcaggcgagatccaattctgctgggaagatggcaagcttctcttttacaaggagataccagggatttctcccctaaggatacactgcttcccctcatctttcctgattcctttccagccacacagggatctgatcttatcaaggggagagatagggacggacatattcctgcttgggagctatgggtctccatcatcagagccatttccacccttacaaggaagggcaagtgaatagatctggccccacaagcaagaaggaaaatccattctgctgctcaggtcatagatggggagctgagaagaaaataaacggtgagtgagaatttggaattattacttctttttggttaattttttttctgctgctgtattgtgtctttgcatctgattccaagaaaaggattgaccccaaggtggaggtggggcatccatacagatgacatcactatcactgcatgactgctttgctcagagctgggagctgggaaagggatgctgccaagtctggcaatggaggctggagcttcacaaggggagttttcctggtggatgtcagccttgagaaaagccctcctggggctggggctgggtcttttcttctccaagtcagtcccaaatccttttaggagaaaacacaccctccatttggaatgtactgagaagtagaattgaaaggtctgggtgagggataggaggaaggatgaatggaggagggccagggaggactcccgggcttctggcatctctccaatgaggaggggaatccagggatcactgtttaaatgtgcaaagtctaggccaggcatggtggcttatacctgtaattccaacgttttgtgaggctgaggcaagaggatggcttgaggccaggagttcgagaccagactgggcaacaaagcgagaccccatctgtactaaaataaaacaataacaaaaaattagccaagcctggttgcacacacctgtagtcccagctactcaggaggctgaggtgagaggatcacttgagcccaggaggtggaggctacagtgcgctatgattgcattactgcactctagactgggtaacagagcaagaccctgtcgcaagataaatacttaaataaataaatgtgcttagtctaaagggctgctgggatgtctgaaaagcaatggatgccttgtagagagcccactaaatgggcacaagggttttctgttttctgggggtacccagggttctagctggaaagggacaggcttggagataagtggccctgcaaagactcttctccttttccaaccttagtattaaaatccctttgatggtccagtgggccttaggccaaaggaagaaaagagtttatgaaaaaccattcaaagaactaaaaataacttgctcatttctcggctagactggctttgttcaagtcttagaaaaggcaaggaaaaaaaaaaacttgagagcaaaaaatccatggcaacaagcatcttctgtttatggatagcatcccagggaaattaagtgtctggctgctagagagtagaagcgaagtcaaagtcatctgtatctgtttacttttctcagattgagcgaactgaaagcccatacctgttctatatctccaccagaagtaaatacttgtatttttgtttgacaagacataagcccaattgtttcaggagttttgaataaagatgataacatatcattatgattgttggatgacagactggctttccatagcatggattgccaagaagggagggcaaaatgaaataagtgggtgttggtaggtataggttctaatttctagtaaaaatcactattgtgttttcatttaaactgttgactgtttttacttctttgattctctttttaaaatttataattaatttcaaacccacaaagtaaactgaaccatcctcaattatctctaaataaggtaaacatttttattttattttattttatattcattttagagatgaggtctctctatgttgcccagcctggaatgccatgtctattctcagaaggaatcacacttccttttttttttttttcctttcttttttttgagacggagtctcgctctgttgcccaggctggagtacagcagcacgatctcggctcacagcagcctcggcctccagggttcaagcgattctcatgcctcagccacctgagtagatgggactacaggcacctgccaccaagcccggctaattttttgtagttttagtagagacggggtttcactgtgttagccaggatggtctcgatctcctgacctcatgatctgcacgcctctgcctcccaaagtgctgggattacaggagtgagccaccgcgcccggccgagcaatcacacttctgatcaccacaggagttttgacctgctccttttccaacctgggccagttcaccccttcttaggcaacctggtggccccctgctcctgggaggtcctatattgatgccaaacatagcgcgcaacagcccagaactcccggacttcagcaatccttttgtcttagcctccaaatagctgggactgcaggtgtgcaccacagcacccagccatacttattttagaatttatttcatgtgttctattatttcagttcttcaaatgcaaattcttcacttgttgcacaccctctcacacatgttatttattactgtgaagtcaacttcaggaaggggttttctgagagtcttatgtgcttgacctgcaaaagtcacataactgaagcccctgctggtggtttattctcacccaagactctggacccagctctcatctctaaccagaatcacccccaggatccggcacagacaccatttacaggtgtgtatgtcagagctcatctctcagacaggctcaggtccagagagaaaaccaacaaataccgcaggtgaccccaggtgtttttgaagtcattaccccctccctgagctctggtgcctgtcctgaaactccttttgcaaatgaagacatttacatttcatgtcctctgcatcctcctgccagggccttcggctgatcaatacttttagctgacaatattccccacaagctaaagaaatggctctctcaccatagagatgaacagaggcttcttcatgggtttactggtgatatcaagtttccattttacagccttgtgaaagcatttagaaaaccatgattcctaagtagtgtgaatagaaaggaacctatttgttatgctgatgtatcctcctctatagactcagggatagcctgactttagccatgcacaccacactttctttgctgccgtgtgtgggacccaggtaagaaggctaaagagatggctgacacagaggtgaaggagggaagaaccactagaaacctcggagttggtgcaagaggcaagatacaaagagaaggaaccagaccagccacccaggattactgaatgatgattacagaagcccagaataggaaggcacccgggaggctagaggacggaatttggaggctgggcacaaggttgtgggcaggtgtgcaggtgtgtgggtatgcaggtgtgcagttgtgcaaatgtgcaggcgtgtagttgtggaggtatgcaggtgtgcaagagtgcaggtgtgcaagtgtgcaagtgtgcagttaagcaggtgtgtaaatgtgcaggtgtgccgatgtgcaattttgcaagtgtgcagttgaggtgtgcaggtgtgcagttgtgtgaatgtgcaggtgtgtgagcatgcaggtatgcaattgtgcaagtgtgcaggtgtgcgagtgtgcaggtatacaggtgtgcaggtgtacaagggggagcatgggagacaggctaacctctctgaggcctcgttatctgacaaggtcaaggttccagcattggccaagaggttgccatcactgcagccccctcattgtggggaatcctggggctctgggaccacagttggatctccatcagccctgctgatggactacattggctgaagggaatgcctggaactagaagacatttccaggctctgcaatacagcagcccaggaaaactagaggctcctcaatgaggagaagcagctaagcccagccctgccagggtcctgtgcctgctctgctcagtgagtgccccctctcagggatgatctggtcctaacctcttgggtcattttggtgaaatgagagttcattcctgcagaggtcaggccagaaaagagagggggaacaaaattccagagacaggaagagtggtggagtgacaaagggccctgtaagaccccaccacccgaaaaggaccctgcctgctgccaaacggcagattggtgagcaagtggtttcttgcagggcatctataagtcaggagcgggtgactggaggtgcacctgacaaacacacccagcctgagatacccagatatgaggatgtgaggtagggctttcctaacaccggctgcctctgagccctccaggtctaatcagttatccaaataccgaacctgctcaaatggcatggtttccacctgggccaggggccgcacggggtaaaggcgtagcatgtatctgctgttcattctgttattcaaccaacatttgcagagagtctttcaaggggcggcacagttctattaatttttttatctttatttatttagagacagggcctccctctgtcacccaggctggaatgcagtggtgtaatcatagctcactgcagcctcaaactcctggtctcaagcaatcctctcaactcaacctcctgaatagctgggactacaggtgcacatcaccacatctggctaatttttttcatcttttgtagagatgagctttcaccatgttgcccaggctagtctcaagctcctggcctcaagcaactctactgtctcagcctcccaaaatgctgggattacaggcatgagccactgcaccagcagggcatggttctggggttcagtgtgaatgagacagattaagacaccgacccgtcctcatgaagcttacattcaggcaggagagacaatacaataacaaataaacaagaccatttcagagatccttctgaatgctaaaaagaaaataataaatgttattaatagtggcatataaagtgacatgggggtggaggtggggcagagttggtaaatgggaaaagtgcctcacacaaggtggtttggagctgtgatctgaatgacaaggagaagccaactgtgaagatgagagggaagaagtttccaggtagagtcacagcccatgcaaaggccctgaggcaagaaagggcttgaggagttccaaggactggcagaggccagggtggctgcagccttggggaaggaggaggagcggggatctaagagctgccgaggagaggaaggccttgggctgtggctacagctcaagcctactctgggtgcagtgggaaaccgttaaccaggtttaaattgggagtgatgtgatcaagtcatctttttaaaattattttttgttttattattatatatttttagagacagggtctcactttgccacacaggctggagtgcagtggtgcaatcatagctcactgcagcctccaactcttgggctcaacagatcctcccttctcagcctccggcctacagacacacgccaccacacccggataattttttaaaaaattttaagagacagggtctcgctgtgttgcccaagctggtctcaaactcctgagctcggctgggcgtggtggctcatgcctgtaatcccagcactctggaaggccgaggcagaaggatcacaaggtcgggagatcgagaccatcctggctaacacgatgaaaccccatctctactaacaatataaaaaattagccgggcgtggtggtgggcgactgtcgtcccagctactcgggaggctgaggcaagagaatagcgtgaacctgggaggcggagcttgcagtgagccaagatcatgccactgcactccagcctgggcgacagagcgatgctcttgtctcaaaaaaaaaaaaaaaaaaaaaatcaaactcctgagcttgagcaatcctcccacctcaacttcccaagttgctgggacacaggtgtgagccactgtgcctggccatcaaatcatcttttaggaagtcctctctggctttgtatgaagagtgggctacaggggacgagagaatggcaggacaccaggtacagggcaccaggtgggactctgtagcgttagtccaggagaaaggggatgcaggctgagctaggatgggagggacagctcgcatccctctcctggagtacttcccaaactgatttaatgacagaacgctttcaccctggtgctgccttccagctgtccctgcagcatggcaagaaggagtttgctctgctcacttcagctaaattcttcttcacaaaagcatctcctttgctggtcttgcctctgccagttggtctaggcataagcctatgtgctgtgtttacttaattacagaaaacaattattctggaatcttgggacacttaggcactgactttacctttcttaacataaggactcagaaaagaatttagaaaatgaaccaaccccctaatcagatgcctgaccaaatgtcctggaggatgctggaaatggggataacattttctttccttttcttttcttttttgagacacagtgtcactctgccgcccaggctggagtgtggtggcacgatcttggttcactgggacctctgcttcccaggttcaagtgattctcatgcttcagcttcctaagtagctggattacaggcagccgccaccacgtctggctaatttttttttttttttttttttttttttttagtagagacggggtttcaccatatcggccaggctggttctcaaactcctgacctcaagtgacccacctgcctcggcctcccaaagtgctggaattacagacattagccactgcacctgaccaggataacattttctgtccatgagcagacccttgttttttctcttgagtctttttttggggggtggtgcggggaatatcattaggatgggcaaaactctgtaaaagtgatgttagcacagagattcaatggtgactttaagtgcaaattatatactttaaaaatacaagccattattctaatcaaaataattgctcatactatatgtgtgaagacaggtgaaattcaagagatacagtttgcctgtggtgggatcaattatcagaactcactacgctacagtgcacttcttttattaccaggagcaatagattttgcactaaagattctcacttaaatcctactgctatgcatcatctgcaaaacatgacactaatgtaagcatcttagaaaacacttacatgtacacacgtaaatagtgggaaaatcaactaaactgaaatcagcaaagttgttgctcttcagggagtgaacaaaaggtagctctgcgaacaaaggtacattggcaccttcaacagttaaatggcttaccatcccaaactgaacgcaggactaatgtggaatgatgtcacggggccccacaaccatggcagctccttggattctggctccaggctcagatctgctgctgagcccaggaatacattttattttatttcatttcatttcattttcatttcatttcatttgtttttaattgaggcatggtctccctctgtcacacagactggggtgcagtggcaacatcttacctcactgcaacctccacctcccacgttcaagcaatactcccacctcagccacccaagtagctgggaccacaggcatgcctcaccgcacctggctaatttttttttctttttttggtggagacagggtctcaccatgttgcccaggctggtctcaaactcctgacttcaagtgatccgcctgcctcggcatcccaaagtgctgggattactggcgtgagccaccgcgcccggccccagggacatgttttagagcccatctgacagcacacaaaacatatctcacacttccagattgaatggaatttgagagttaaatcaattgccttaaactgtaatcctgcaatgtaccataactgaaatattgtgaaataggctgtgcttgaataactgaagcctgctagaatttacacattaaaacccaattatgacaactggaaaggcctgtctactacttcagccccgacctgtgacaaatataatctcttgttctatcaataaaaggagaggacaaaggaggcatgtgagcatgtggcacttggtttttctgcttgttttttgttgttgttgttgttgttttgttgttttttgttttttgtttttaagatagagtcttgctcctttgtcgcccaggttagagtgcagtggctcaatcatagctcactgcagcctccagctcctgggctcaagcaatcctcctgctcaatctcctgagcagctggaactatagacattccacacctctggttaattttttgatatttttgtttcaccatgtggcccaggccagtcttgaactgctgagctcaagtaatcctcccactttggtctcccaaagcattgggattacaggtgtaggccaccgtgcccagccagtttttgctgtgtttctaaacacagcatctcctgctgccaaacaggagatgatgtttaggcacaggacctagaagatattgtgcatccagacaggcactcatctttccacccagaaaaaagagctcaagtgagttcagttcacagcctttcaagggaaggaggctgtcgatgctgtttggttcttcctctgtgcatcatctgagccagctcttgtttctgcatctgtagcaaagagagagagttgtcctctgaattccctttccacattgttatgactcttcgcaagcatgagcctatgacccatggggagaatgcaacctttgcccacactttccagagactgcaagcagcatgccaagacagtgccctgcttgagactgtgtgtgtgattttagatcttaaactcttgatgatggctttcatttctgggtaaaactgatgctttcctaagaattccaatagctgcagcaccacagagagatgttcaacagataaagagctggtcaaaatgggataaggcttagcttgctggcttatctcacttcatccctcgccaggtttcctcctctattcctgggacttcaggtgtgtccaggagccacagggaactctcgtgggttggcagggagacataatttccctggggaacagcacagggagactgtctataaggggataggcagaagctctggagcagggacaaggttagtgctgtctgggttttgagcaggtgcctttgctgctgagaccaggacagaggtggggttggacagaggtggccaagggaaggtggaggggtgatggcagggtgttctggggcactgcgtgggtagcagcttgtgctccagcgtcgagtagggtcagtcccagtgagactggcctggctggaaagggaagaggggaggtacagagaaaaacagtgggtgccaaggctggacttaggtattctcaaagaacccaaagagagtgttagtagaagacagcccaaagaccactgcccagaaggaaatatttttgctgttgtatagaatacggctctggaaaaacaaggctgacaaggatgtatttgaatggcatgatcacaccctgaccacagacaaagataacaagctaattcctaagagctgcagttggagaaactgaggcaggatccatggtcacagcacgggatgctgtgctgcactctacagctcttagtactacatggccttctactgctgtcaggtggtgcatgtgtgattctgagtggggctaggggaaacagccttccctacccctcacccctgaaatgaggactcccgtgcttctctgggggagctctgcagcagggttcagcagctgccctgaagtgacaccagggtcctagtggctcagacacactgcagctggctctaccctgaatcagaaaacccagctctgaggatgacttgagcagttaaatgaaagcttatgtcaagtctcggtcccaacttctcctggaagaatctcctggaacttctcctggaagaattaccctgcagttttctcaggcttcagaatctaaagcttctcatttgagatcaaatccaatgactccaaacaaatcaaaaccaaagaagtcttctttctggctaataacaatttttgcgtgcaggtctaaaacttcctgggagcttctgaattcagccttcccctccctgggcaccaattcagcaggggcaggtatagcgctgtcaatgggctccaaagcaaacagacacccacaggacccaggaatcagacaaaagaaagggggcatgcgggacatgcagggaatgttcatgggacagggaagaagtccacaagccctttctctcccggcagctcgttgtcggatttcacctggaatatctttggcctacatccagattaaatgccagttagaaagctctgcccacccgacttttcggggcagacagcaacgatggtgagctctaatcatttacaaaggtcatgatccagagcgagccgcggagcagtcatttaaaattcgattgatccctatttgtagtcagggaaagaaaatgggcacttggactgtattgtaattatgaggcttccaggcaaccataaatagatgtgcaatctcagtactggaaaatatctggaagaagaaattattactctggcatggtacgttgctaggaaaggttgaagacaaaattgcgcataaaaaaatcaatcatcttttagctaatttgcttctctcgccactcatcggggttatcacaattatcagatgtctgccgaatatattatgaggaggatctgctggctgaaaatgatcttcaagaaagcaaaggcctcaaatttggtggggactctggagagctggcatttggggctgggtgggctccaggggccacgagcataagggaagagccttggggtggctcttttggagcctcttgctaagggataggtttccagagttcttgagagcatcagccctgtgtaggcactgcaaataccatctcgatgtccaccctgctggggaaatcagtctgggaagaggaggatctgctcattctgtgagtggcagaagatcaagtggccggcacatcctctgctgcttagtcccatggggctggccctggtacttgacattcataaccttaaccttaaccacacccccgggaatgagtattaccaaccccctattactgatggggaaactgaggaacagcaagattcagaagtgtgcccaagatcacctggaggcatgtggcagagctaagcccagagccacctggaggtggggaccaggggacctggaggtcccaccttgttccaggcagggccacgccagtccagtgcttttagaagaggcgaaggcaggggtgcccactctccacctctgcctctgcctctcttccatgcccctgaagaatctctcccttcgaatccttaggaaccttcaaggctctaggcaaaaacaatgcttgctggatggcaaatgttccccacgggggctggcgagccttctgagtctacttcctgagcctgccatagtccagagggctggccctggttctgtgtggggaggatctctgaccctgactccatggggtcaccccaccttctgagctggtgcttccagcaccttgacatcccagaagccccatgatggcctccagtgggatcaacagagcactctcaggaatgatgccaattaaatcaaggtccccttttctctacacggaaccagccaacaccagccagcagtgccagaccgtgagctgggccaggcaatccccagccaggcaagggtgacaaagaggacagcccacctgggaatcacctgccaccacggaactagcatctaaaggagcgtaatatactcatgtcattctttttaaattttttcttattttttaaaaataattgagatggggtcttcctgtgttgcccaggctggtcttgaactcctgggctcaagtaatccacccgccttggcctcccaaagtgctgggattacagacgtgaaccacagcaactgctcatactgaagtaattctacttctacaaatctatcccagggaaacagggtgtagacagagatgtatgcatggagatgttgatcccaatgtcattcaacaatggcaaagaatgtaagtattcaccactggggactggttggatgaagtaaggcctacgaattgtgtagatattacaccaccattgcaaggctttatatagagtttctagtgctgcgagaaatgtttatgaaagaaggctaaacaactaccgcaacaacaaaaaaaaggaataaaattatatggaaccttgtggaggatgagtgaatggataactatgaagattactagtgatgaggttccactttcctattttttggttcttttcaaaattgtctgaagttcaaatcgaaaccacaatgcaataccactttactcctgcaagaatggccataataaaaaaaaattaaaaaacaatagatgttggcatggatgtggtgaacagggaacacgtctgcactgctggtgggaatgtcaactagtacaaccactgtggaagacagcgtggagattccttaaagaactaaaagtagaactaccgtttgatccagcaatcctactactgggtatctacccagaggaaaagaaggatcatacaaaaaagatatttgcacatacatgtttatagcagcacaattcgcaattgcaaaaacgtggaacgaacccaaatgcccatcaattaatgagtggataaataaactgtggtataaatatacaatggaatactactcagtcataaaaaggaatgaattaatggcattcacagcaacctggatgggattagaggctattattctaagtgaagtaattcaggaatggaaaaccaaacatatgttctaagtgggagctaaactatgaggatgcaaatgtataagaataacacaatagactttagggactcagggggaaagagtgggaaggcggtgagggataaaacactacaaataaagttcagtgtatactgctcaggtgatgggtgcaccaatatctcacaaatcaccactgaagaacttactcatgtagccaaacaccacctgttcccccaaaacctatggaaataaaataaataaaacataaaaataaatttttaaaaattgtctacaattagctaccatccttctcttcccaaatcttgtggccttggagtggtggctgggatcctggcctgccatcctgggtcatccatgccaacagcaactcaggaaccccaaatttgggtttaccagaaggagctggtcttttttaaaaaaattgtgacaaaatttaccctttcaaccatttttaagtgtaaaatccggtggcactaagtatattcgcaatgttatgcaaccatcaccactatctatcttcaaaacttcatctccttaaccagaaactctgtgctagttaaacaataatgctctgttccccctccccagccccaggcacccccattctgcctcctgtccctgtgatttgcccagtcccgcacctcctacaaatggaatcacacagtctttgtccttctgtgtctggctcttgcacatagcatggtgtctccaagatttgtcccaccccgtccctacctccatttaattctcattaaattcaggacgggcagggctgttcccacttaacagtgggagaaactgaggctcacgaaggttgagccaggacttgttctcagtttgaccctgagtccatctcttgctgcagccgcggagacctgctgagcacgttccagagttaggcgaggaaggagccgtggtgggtgtggcctctccagtcgtgtcacctgtgccgagctgagtgtttgcacgtccctccaccccgactcctgagaataaacagtccattcgccctaaagctttcctgaggtcacaaaggtcttgggcaagactcccagcttttctgggcagctgggccccagctggttccttcccagagcccggctctgacaccctgcccactcaatcctgcttcccaccctcagggaggcagacgcgggcagacgtccttgccctcacattggcccactgccctccccatgttcttccctctctcagcagcatctcgaggcccctcgaaggtgtcagacccagatggctgacctcctgtacatggggagggctgggctgcagccctggggcccctcgacagccaccttcacccaaggttaccaaagtgctgtgcacactcacccaagggtcccagccagccgccatagcaagcagaacagcttctgtgcagcccccgtcaggagccaccttgaatcttccttcaaaccagtcctccaaagggacctggtgacgctgggccccaggggctcactgtccccagaaacaggccttctcccagtcctggctgtttccacccaccctgggaagcacccccactctgaacactctatcatagcaatgggggactttgtgaaaattgtatccctagtaaagataccttctccacaaccgaatcagaacagttcagtaatgggtagagtccccttaaacaagtataatacctgctaacaatgctcacctcacattacctgtgaggtaagcaattatcaattttccactctatttccacaacacattacattactactgaggcacatataccttagaaatgatcatttcctctttctctctcaggtgtctctttctctcttttattattattattattttagagacagagtctcgctgtgttgcccagagtggtgtgcagcagtgcaatcacagctcactgcagccttgaattcctgggctcaagtgatcctcccagctaaacctcccaagtagctggactacaggcgctcgccagtaggccttgctaattttgtttttacttttgtagagatggggatctcactgtgttgcccaggctgggcttgaactcccagcctcaagcgatcctcctgcctcagcctcccaaaatgccaggactacaggtgcacatcaccatgcctagccttgcatatcattttagtcctgtagtgattaagccaaaaatccagacaggtggtccctgtgatactgtgatgcttgcctttgctccaatctctcccagcatccccagcttggacagccgcgggagtctcttcaccagcctccctgcctttccccttgccccctttgaaaactatccccctcacaaaagcctcccaaagcgctgggattacagatgtgagccactgcgctcagccagctttgtcctttgataacctctgtatcttcagggactatgacagattaggtgctcaacaatgtttgttgactgactgatggaatagttgtttttttgttgttgttttttttttttgagacggagtcttgctctgtcacccaggctggagtgcagtggcacgatcttggctcactgcaagctccacctcccaggttcacgcccttctcctgcctcagccccccaagtagctgggactacaggcacctgccaccacacccaactaattttttgtatttttagtagagacgggtttcactgtgttagccaggatggtctcgatctcctgaccttgtgatcctcccgcctcggcctcccaaagtgctgggattacaggcgtgagccactccacccagcctagtcggggtttttttaagtccacattttatccaaggctccccttggcctctgccccatccttctgctcaaaggagttgtcctcactatcttagtccattttgtgttgctataaaggaacacctgagactgggtaatttctaaagaaaagaggtttatctggctcacacttctgcagactgtacgagaagcatggtgctgacatctgctaccagtggggcctcagggtgcttccaatcatggcagaaggggaaggggagctgtgtgtcaactggtgagagaaggaacacaagagagagaaggtgctagggtctttttaaccatcagatttcgtggtaactaatagagtgagaactcactcattaccaagccattcatgacagatccatggccatggcccaaacatcttccaccaggccccacctccaacattgcggattacgtctcaacatgagattcagagaggacaaaacattcaaaccatgtcacttattgtcttacccgttctgaaggctcccaaagcttctgctgtgtcctgggtcaacctgcccggaccccccaggggatgcaaatacaacccattgctgactcagcattgtctcttgggcccctgctcttgtcactgggtttctcccccaagtacttgcccaagccagaaactcaggagcctgaagcaggtgcaatttttttttctttttctttgagacagggtctcgctctgtcacccaggctggagtgtagtggtgcaatcacagctcactgcagcctcaaccttccaagcccaagcagtcctcccaccttggcctcccaagtagctgggaccacaggcacatgccaccacacctggataatttttgcttttatagagatggggtctccctatgttgcccaggctgttctcaaactcttgagctcaagcaaccctcctgccccaacctcccaaaatgctgggatgacaggcatgagtcaccgtgcctggtctcagatgcattttgtgtcccccgcttcttgtcctttcgagagacaatttggaggcgtgtttcacatggagtcccctgcagggctgcaggctccagcgcaattgcccacctttacaggggtctcttccctgccttgctctctctgtgttctctctctgggctcccctccaacacccgcagttgagtctccgactcactttccagggcacccactgtgatgtccccctggatgcttcctttcaccaggcacaaccagttggtccccagtctggtggattccacccctaagtctttctgacactgtctgaattcattttctgtgtctgctgtaactaattaccaccaactcaatggcttaagacagcagaaatggactctctcacagttctggaggccaaaaattcagtatctgtgggctggaatcaacacgttggcaggctctggaggagaatctgttccgtgccttttccagttctatattccttggctggtggccacatcactcctgtctttgctttcatggtcacagcgccttctcctcttctgtccgcatcaaatctccctctgcctccttagaaggacatgggtgattgcatttagcactcatctgcatgatccaggagatgctcctcatctcaagagcctcaacttcatcacatctacaaagtcccttttttttttttttttcgcccaggctggagtgcagtggtgtgatctcggctcactgcaagctccgcctcccgggttcatgccattctcctgcctcagcctcccgaatagctgggactacaggcacccgccaccacgcccggctaattttttttgtatttttagtagagacggggtttcactgtgttagccaggttggtctcgatctcctgacctcgtgatccgcccactttggcctcccaaagtgctgggattacaggcgtgagccaccgcacctggctttttttttaatttttttttttattttttgaaatagtctcactccgtcacccaggctggagtgcagtggtgctatcttggctcactgtaacttctgtctcccgggttcaagcgattcttctgcctcagtctcctgagtaactgggattacaggcatgcaccaccacacccagctaatttttgtatttttagtagagagggggtttcatcatgttggccaggctggtctcgaactcctgacctcaagtgatctacctgccttggcctcccaaagtgctggaattacaggcatgagccactgcacctggccctccttttttttttctatataaggtaaccttcatagattccaaggattaggacctgatatctttgggaagcattattcggccgccacatgtcccaccgtcactcccctgcccccaactatcatgaacgacctcctgtttggccccatcaaatcccagctataatcagagacatctttctgaaggcaaatctgctccagtagctccacactcaaagccctcgtctggctttctgctgcctgcaggacatggagcccacggcctagccaggccccactccctctctgcaccagcctctcccaccacagctcccagtgcctcgagggaccaggaaggctctgctgccccgtgcatgtgcaaggtggggggcacagctccagctgactgcaatcaagtgggaatgcagatgcaggagttttaagagaacccagaaatccaggtttggtttgcttttagttttagtgtgaaaactgtctgtatttatattctgacatctaaagaagaaaatgtgacatagcacaggccacacaaagcagtcttccatctgcccctttgcaacctctgcaggagcgtgtggctcccttccgtcactcagcctctgcctgctctcaccccttgctagaaacaccccctggccctgtcctctaccccctaatatgccccttgcctaatgagccctaactctcccttgtcctctgcgtggatgccatcttcctgaagactgaccaaggtattctcatgggctgactcccatcctggctcacatcaccccgaagagatgacacctacccagggtctctgtctcccacaagaccgggagcacctgcagggcaaggatctatgcccccacagcctggtacagatatttgcagaattatgaatatagttctctcccttaggaaaacaccaaacattttattttcagggtgtagccacaaagttaccaaatttggaagcaaaaacatgagttaaagttcttccaaaatgaattcttaaacttagacttaagaactgttggctactcttgcaaaagaccaataggaaagatgagagtctgcctgcactttttgggcagagtcgctattcactgactgtcaggatttgctgccagcacttggaaggcccaccaagccttccgtagtttggatatctgcatccgtttgcactccgctgtacagccccatgaagaatagagtccagcagcaccactgctcttgggctcttgggttgacagactcttatccaagtcttttttttttttgtagatggagtccggctctattgcccaggttggagtgcagtggcacaatctcggctcactgcaacctccgcatcccaggttcaagtgattctcccggctcagctcccccgagtagctgggactacaggcatgcaccagcacgcccggctaatttttgtatttttagtacaggcagggtttcaccatgttggccagctggtctcaaactcctgacctcaagtgatgcacctatcttggcctcccaaagtgctgggattacaggcatgagccactgcacccagccaactcttatccaagtctatcaacaccatggtagccaacattaaccattcttatgagtgtaaatgacacttatctgccttgtgtgcaataccttgaacctacctggcatcatggcatcccaacccacctattgcagaggaggtgaacatcaccaccttaggagaagcaagcagctagaagtttacaacactggtattcattatgactgcaaaggaataccatcaaatttagaatgcttcctgactccccatcccccaaaacttccattgaaagagttaattttacaataaccatcacaaaggactgaagcagaagtccagcaattaaagtataaaatcaattagcatagaagcagagcctggtataggtgaatttggaggcacaaatttgaccaaaacaagcgggaacagttgctttggaaagagtctgacaactttgcactttccacattgtctgccattaacatgcagtacctttataatcaagcaaatggtgaaatatttaagtgtctggagaaacagttattcagttagcagaagcctcccaacagcccacggagctgctggactccgggagcagcagagggatggggcgagcctttgccctgcagggggcacagcgcggacttgggaggcaaaagcaccaatgtgtggtgcttagatacctcccaccccagaggcagctggtggtgtgaggaccgtctggggcggggccataagcacagctccaggtccagagacggatatgggggtgggggtgtcggagagggcctcatttctaggagtaaatcttgagaggctttcagttgcttgcttgctttatttatttatttatttatttatttatttatttatttattttgagacagagtctcgctctgttgaccaggctggtgtgcagtggcacgatctcaactcactgcaacctcagcctcccacattgaagcgactctcgtgctttagcctcccgaagagctgggattacaggcacccgccaccacacctggctaatttttgtatttttagcagagacagggttttgtcatgttgcccagggcggtctcgaactcccgagctcaagatatccgcccaccttggcctcccaaagtgctgggattataggcgtgaggcaccgcgcccagccatcagctgctattttaataccgcttttatttcactgtggtttttttttttttcatttcacctcttcactttcttgtaactcatgctactgaagcaaattacttgctaaagaaacacagcctagcatcgaggcattctttaaatgcagcgagacacaggttttaggctgagtaccaatcccctggaagaggccccagccacatgacccttctggaggtgcttctctgaggtgccctggggctgtgagtgatcgtgtcagtgcccggcatgctgcctggcatacataggtgatggctgaatgaatcttgaaggattagagatgctacattttgggtatttgaccttccaaacctcatgttgaaatgtgatccccaatgctggaggtggggcctggagggaggtgtttgggtcatgggggcagacccctcatggatagatgaatgcgctcccagagtggtgagcgagttctcactcttcttagttcctgagagagctgggatcatttgaggtcaggagttcaagaccagcccggcctactaaaaatacaaaaattagctgggcatggtggcaggcgcctgtaatcccagctacttgggagactaaggcaggagaatcacttgaacgcaggaggcagagattgcagtgagccgagatcacaccactgcacttcagcctgggcaacagagcgagactccatccccccaaagaaacctcaaaacaaacaaacaaacaaaaaatactaacatctttcccctctctctcccttcttctcttgccctatgatctctgcacaccagctcctctttcccttccaccatgggtggaagcttcttaaaggcctcaccagaagcaaatgctggcaccatgcttcttatacaagctgcagaaccgtgagtcaaataaacctcttttttttttttttttttttttaagagacagtgtcttgctcttttgccccagctagagtacagtagcgggatcatagctcattgtagcttccacctcctgggctcaagcaatcctcctgcctcagcctcccaactagctgagcctacgggtgtgcaccaccatgcccagctaattttgtttttacttttgtagagatgggggtcctgctatgttgcccaggctggtctggaattcctggcctcaagcgatcctcctgacttggcctggaaaagtgctgggattataggcgtgagccaccacacccagctctcttttctttaaaaatgacccaaactcagatatttgtttatagcaacataaacagactaagacaacagattatatccaagcttcttctctaactgaaaacagcaaagcttaatgctggttgtgaccaccatggagacagagtagagccttgacctctctcgacctttcccagggagaagagactaagcagattatttgagggctgctggcatccactaagtcaatatttagacatcatattgagcctctctgtgtgatctggaaagctccctccacagacaggacttgtctgaaaaggagaaggtggtttcactcccatggaggtgccccaggggtccctgagttagaaaggggcctggctctgtgtccctggcagcctctccctcatgcctggtacaagctggaccagtcaccataacaaagagggacttgctttaaaaaaagaaaaaaaaaaaggtgggagacacaccatatgaaattgatggggatgccacagtttgcaactgccatttcacaaccactttagaagaagcagtgtgttctggtggtaatgaattcatcatcgtattcagcaccacttggacagtgggtgggaatgtggctggattttccatttccatggctgtaaaccagtaagctgtgaagcaggaagtctcacatagctacaagatgcaactgctagactctagaatagaagggtattaattcactattatgctgtctcctgagctggaagcttcctcgtggatagccctcacctctcaccactcagagacctcagaatcttccctcaggctgtgctggttcaggccctggtgagatcttgcctggttggtaaaatagcctctaccatggcattgcacaaagccttagaaaataatgtgaaaagcgcccctagcgttgtacagctgcagtcagcagaagtctcttttataaatgcaaatccaaacctgtttatacttggccctaaatgctgcagtcctcattgccctgggccctaacgcacaccctccaggctcattctctgggtcagaaccttagtgagtccctgaacacaccatgcacattcacctggccttgctcttgaacttgctgctcttcgtccagagaacccttgccctccattctggtctaataagcccctattcattctgtaaaactcagtgccagtgccacgtttctccacgatgccccctgctcctggctgccgctttcacacttaacaatgagttatctacctttgcaaatatgcattgcttctgcctggctcttgcaagcttcttacaggcaggagatggtgtctttttcacctttgtatccctggttatttgcaccaactctagcaaagagcaggtgccagatcatgtcggaggagctgaactaggtgtttggaagtgctgcatgagggtctgtgcttacaacctggatcttcggtaaaattctcgaggtcagacaggttgaggctctaacagaggtggctgcttttgtctgtgagattcctggcgggtcagtatctatccatcatcaccctcctgtttttttttttttttttttttagacaaagtcttgctctgtcgcccaggctgtagtgcagtggcgcaatctcagctcactgcaactactgcctccagggttgaagcgatcctcccacctcagcctcccaagtagctgggactacaggcatgcaccaccacagccagctaatatttgtatttttagtaaagacggggtttttattggccaggctggtctccaactcctgacctcaggtgatccgcctgcctcagcctcccaaagtgctgggattacaggtataaaccactgtgcctggtggcctcccttctttactccctatatctgctggttcctgcactcagagctggaactgtgcagagggcaaatgtgtcaaagaaatcccacacactcctgcatcctcctaaggtgtcccacagacctgcctgggttcctgctgagccaaaaagtccatctggggtgcccacacgttgacccctctgcccatccagccagagctcaacagtgcacatgctaagtacttctgcacccagaagcacgaccaggtcacatttggaggctggaatggcagccctttgggacttgaccctatctccctgcctttgcagccatctcttctctcactcacccattctctggccttcccaagctactcacactcccgaatggaccatgcattcccaccgactgtacccccatcctgcaaggccttctgcacctggcaagctctgcccattccccaggagccctcacaagtgtccctccctctgtgacttctgtcctgactcgcctcccctctgctgacttaagggctttggagcactcaccaccgtatgctagtgatttgctgcttctccattgcacggggcccatgaggccctgaggacaggaatggtctctgtgtcctgggtttccctccaggctggggtggtgttctgcatgcagcctgcgctcaatttgtgctcgtgggcaccaaatcagatgctcagaatggtggaaagaacattctagaaaacagctactctggtccatccacacccttcccaggaaaagaagatattgatataaaatcttttcctttctctaaagaaatatttgcaaatcttttgccaaaatctctgtgagtgagcatgtacaattgctgcaaactgcaatgaatgagcaaaaaggttaattttcactcccctgtctgataacagggttattgaatcagactcctcagcagagaccctcagaccaccgggctgagcccctcagctttttttttttttttttaaatgggaaaaccacacgtttaaggaccatccttcttttcaccaatgagaaatcttgagcctcttcctagtcttgtttcactaaaacactttattttaatcaagtacttggagagaaagctgctgaaacttattcaaatgcaacacttaattttaatcaagtagttggggagaaagccaatgaaactatttccagagtatcctatacagataggaaagaaggtaacatgctgttcagaggcactgctgtttctgtgactgggtccgtagtctaatacagccaaaatattattatttaaaattaagatgttttttaaaaaagacacaaaacatctaaagcctccattccaaaaagtggggatctctattacaaaagaatacctcaatcaaagttacctgctatgccctgtctcttctcgagcagacaggcccctgggggaagctggggagaaggagattgttccagaggcctggcttccagaagcttccccctctctccatgcaagcaaacaacacaccactggaccaggctccagcagctaaaataaaacagctgtgtttctcactcaacaccctcttttaccagatgaagggcactgattcatggaaaggagacaaatatttcaggccattttttcagacactgacaaggagtaaattaggaaatcatgtaagtacaatgcgcgcgtcatcgcttcctattgatcacatgtaatttacatcttacaaagatgtgaattcttgcattctcactccacaaggaaaatctcgatgatttattcatttcaaatgaaaaatagaaggtagatgagaagaatgacttcacagactgcatcgttctcggggcactggtgcgaggctttctcatacactgcccgaagggctccgtgtgcaagtccctctaattaacaaggtgaatcacgctgcagctctctaattagtgagcctgacaagccagcggaaacagccaggcagactggtatacatcgctggccgacaaaggcacggcacattccaagtgaaaaatgcagatttctccgaaataactataaaaagtaagatggttggggaaaaaaaagacccacctaattttaattctcatgtttcatgtgcagttcttatttgctctcatgcgtaaccagctccttggtaagatgagatttgcctacgctctttgaaccacctttccagggaaactatcctttaaaacagatgcatttttaatgttattttattgtggtaagaacactcaacatgagatctaccctcttaacacattttttaagtggacaatacaggattttttactacagagctctagagcttattcatcttgcttaactaaaactttgcgctgctcatgcctgtaatcccagcattttgggaggctgaggcaggaggatcgcctgaggccaggagttcgagaccagcctcggtaagatagcaagaccacgtctctacaaaaaaattaaataaaataattagctgggtgtgattgcatgcacatgtagtcccagttacttgggaggctgaggcaggaggatctcttgagcccaggagttggaggctgcagggagctatgattgcgccactgcactccagcctgggagacagagtgagactctgtctcaaacaaacaactctgtgcctgttgattagtgactgcctgtttctccctcccctcaggcctggaaaacacccctgcacattttgattctatgaatctgacaattttagatacctcatgcaagtggaattatgaagtatttgtctttctgaaaacacaggtattttggcttgatataagaatcagtgtctcagttggaaattcatgatcttctgtatgtatttttgtccaacatgcagtaccttctagaattattcctacttctgccaaaaccagagatgtctgatgtcaaacctctttgtgatttacttggtgccattcagtcagtcccacagcacaccctacaaggagccctcaaaagccaggaaagggtagaaacttctactctccaaagaggggtggtacccatggttcctgagtcaccagcctggctcacaggtcccactggagacaggcctggtgcactggccatttgccctgattttaattgtctttgctcatctgccaaccggaggctctccttctgtattagtcagggttctctagcgggacaggactaatagtatatatatgtatactattatatatatatgtatatatatacacacacacacatatacatatatacatatatatatataggagcttattaggtagtattaactcacatgatcacaaggtctcacaataggccgtctgcaagctgaggagcaaggaagccattccaagtccccaaactcaagaacttgaagtctgatgttcaagggcaggaagcatccagcatgggagaaagatgtagcccaggaggctagtccagtctactcttttcacgttcttctgccagcttttatactagctgtgctggtagcttattagatggtgccctcccagattgagggtgggtctgcctttcccagcccactgactcaaacattaatctcctttggcaacatcctcacagacacacccaggatcaatagtttgcatccttcaatccaatcaagttgacactcagtattaaccacgacaccttccatgatcattagctaggctttctgagtgggcccagcagcttgggaggtgtcctgggggcagctgccaggtgacctctgatatggtttggctgtgtccccacccaaatctcatctcgaatcgtaatccccacatgtcgagggagggatccggtgggaggtgactggatcatggggacgatttcccccatgctgttcttgtaatagtgagtgagttctcatgagagagctgatagtttctaagtggcagcttcccctgcactctctctctcctgccaccatgtgaagaaggtccttgcttccccttcaccttccaccatgattgtaagtttcctgaggcctccccagccatgcagaactgtgaatcaattaaacttttttctttcacaaattacctggtctcgggtagtatctttttttttctttttttttttttttgagatggaggctcactctgtcacccaggctggagtgcagcagtgcaatctcttctcactacaacctccgattcccaggttcaagagattctcgtgcctcagcctcctgagtagctgggattgcaagcattagccaccacacctggctaatttttgtatttttagtagaggcagggattcaccatgttggccaggctgttcttgaactcctgacctcaagtgatctgcctgccttggcctcccaaagtgctgggattacagacgtgagccaccgcacctggccattggtagtatctttatagcagtgtgaaaacggactaatacaagctctctccctgcatcagccaagtttcgcaggcgtggcctgcagtcacccacagcacagggatgtgctaagagctcaccacagcccacaacagtggggaaaccaccgctcatgttcacctccggtcaattgctccagaggacatggccacagctgctcccttgcaggctggtgggcttgacctcactgagaactgggaatgacctctgcgtccttcacattccagcagcttccagtggagcttggaaggtattttcttttagcattggagaccagttctttaatggatggaaaaaaaaaaaaagtcttgtgaagggaagacttagattcagattcaatgcacttttattgaaccctccatgccagacaccatgctgggaattttctctggagtaggcattgatgttgctactgttttataggcagagacattaggtgtcgggagtgtttaaaattgtgcccagagcagttaggaaatgaagagaagagaagcagaatatgaactctggggtttagaacccagtctgcacccgcacctccctctttgttttaagactcgtgttccctggctctagacttacaaaccgtaggttgtcacttcacaaaattcactgctcttctcagccaagaccagtcacagcagcacactctaatgccagtgagcaaatcagcagttctttgcaatgaatggtcttcctgcctctctctggggagaaataggaatgacaggtttagaaatgtggggacccttttaaggacagccttatgcctgcagcatgactctccctgaaagactgaaactggcaaaacattatttcaaggcaaatatatgtgaaaaagatctgagaagcgtcaccaaaaggaggaccagtcaaaagaagaagccaaagggaagctatggctacgtgggaggccacatttgctcccactctgccaccacctggggctctgccctcctgctgcaagccatgcggctcccaggtttaaattttctatgagtttttctctgcatccaagcaagatcgccacacaccttctcttccctcgaactctccattcagaatcatacagtatctcattttcagcacaaacttaacatttaagagtttccaggccaggtgtggtggctcacacctgtaatcccagcactttgggaggccaaggcaggaggattgcttgaggccaggagtttaagatcagcctgggaaacatggcaaaaccccatctctacacaaaatacaaaaattaggcaggcgtggtggtgcacgcctgtagtctcagctacttgggaggctgaggtgggaggatggcttgagcctgggaggttgaggctgtagtgagccatgacagcaccagtgcctccagtctggatgacacgagtgagacctcatctcaaaaataaataaaataaaagtttccaagccagaggggtggctcacacacgtaatctcagcactttttgaggttgaggtgggaagattgcttaaggccaggagtttgagacaacctagtgagagcctgcctctacaaaaaattaaaaaattagctgggcatggtggcatgcacctgtagttccagctacttgggaggctgaagcaggaggattgcttgagaccagggggttgaggctgcagtgagccacgatcacaccactgcactccagctggggaaatggagcaagaccctgtctcaagaaaaaaaagtttccagcacacactggcccacaagagcagctgtcactgaggggagatcaagggcaagaatgtcacctgtgtttctctgtagccttcacacacttgctctaccagctctgcctgcagaagccttcctggccgacttccactgtccagtcttccatgaagctgtcccctggtcacccttattgccaactccctgccagagcaacttctccttcttctggatcctgtagattttcaatggctctttcttgagacatttaccacattggctttatactgttgtattagtctgttctcacacggctgataaagacatacctgagactgggtaaatcatgaagaaaaagaggtttaatgtactcacggttccacgtggctggagaggcctcataatcatggcagaaagcaaaaggcatgtcttacatggcagcagacaagagagaatgaggaccaagcgaaaagggtttccccttataaaaccatcagatctcgtgagacttattcactaccaggagaacagtatgggagaaactgcacccatgaatcaattattgcccacagggtccctcccacaacacatgagaattatgggaattacaattcaaggtgagatttgggtgaggacacagccaaaccatatcaaccatcatccgtgtaacagatcaaagatgtactttcagacagccagattgagctcagattctacctctgtcaatttctagccatgggaccttagtcacagccttgggtttctgttttcttatctgggaaaactagaaataaccctcctacctggaaaagctatgaaaaggattaaatgagaaaaagctatgaacaagcttcatgtgatgtctggcagagagaggtgggtgctaaggaataatttaacatttttttccttatttctttccttccttcctttctctttattttgagataaggcccctctccttgtcacccaggctggagtgtagtggctcaatcatagttcattgcagcctcggactcctgagctcaagcgaccttcccacctcagcctcccaagtagctgggactacaggcatgtgctaccacacccagctaattttttctattgttttttatgccatggggtctctctgtgttgtccaggctggtctcaaactcctgggctcaagcagtgccccctcctcagcctcccaaagtgctgggattacaggcttgagtcaccacatccagctaaatattaatttcatttttggaattgcatggcgatatggtttggctgttgtccacccaaatctcatcttgaattgtagctcccacaattcccacatgtcgtgagaggaacctggtgggaggtaattgaatcatggggctggatctttctctgctgttctcgtgatagtgaataagtctcacaagatctgatggttttataagtgggagtttccctgcacaaattctctcttgtctgccaccatgcaagatgtgccttttgccttctgccatgattgtgaggcctccccagccacgtggaactgtgactggggagttcacaatataaagttataattaactttataaattacccagtctcatgtatgtctttatcagcagtgtaaaaatggactcatacacatggtgtaacgaaaaggtgatatattgaaacttcaattatgtccgataccaaacccgcgtcagtcataaaccagctgttggcctagtacaggacactaagcccatctgagcctcagctttctcatccagaaatagggctaaccatacccaatccacagatgtgctttcctgaagtagcaggtgccagagcctttagcacaggggacatccaataaatgtcagtcagaagcaaggactctcggctgggtgcaatggctcatgcctgtcatcccagcactttgggaagccaaggcaggcggatcacatgaggtcaggagttggaggccagcctggccaacatggtgaaaccccgtctctactaaaaatacaaaagttagccgggcatggtggtgggcacctgcagtcccagctactcaggaggctgaagcagaagaatcatttgaacctgggaggcggaggctgcaataagcggagattgcaccactgcactccagcctgggtgacagagcaagaccctgtctcaaataaataaataagcacaagacaatactcattcagcctgcagaatatctgtccttgcaggtagaaattccccagggcctgaaagtcacctcaggccacgccaactctgcccaaggacagttcatattcttaggacagtgcttttctggtgctgttagggaccacgtcagttgcaatcaacctcttgaatgcagcattccctggtggaaagcctggcacggggtgtgtttgcttcctagggctcaaagacccacagactgggcaacttgaacaacagaaagtattgcctcatggtttggcggctaggtaggtagctgcaagtccaagaccaagttgtcggaagggtgggttccttctgagagctgtgagaagatctcgcatgcctgtctccttgctcctggtagcctcaggtgttccatggcttgtagatggctttcttcctggtctttaagtggtcttccctgtgtacctgactgtgtcttcatgtccaaacttcccctttgttttctttctttctcttttttttaaagacacggtctcgatctgtcacccaggctggagtacagtggtatgatcaaagctcactgtagcctcaagctcctaggctcaagtgatcctcccacctcagcctcccaagtagctgggactacaggtgcatgccaccttgcctggctacttttatttttatttttttgtagagacaggatgttgctatgttgcccaggctgtcctagaactcctgtgctcaagcaatcttccttcctcagcctccccaaatgctggggttataagcatcagccccagcatctggccaaaatttcccctttctataaggaaagcaatcaaattgacttaggacccaccctaatgagctcatcttaacttgatcatctgcaaagaccctatttccaaacaaggtcaccttcacaggtattaggggttaggacttcaatatcttttggaagacacagttcaacccataatacaaggaaaactctgcccatagtcatttgtttagaagcaaactctccaaggctctggctgggcagggagctgccctgctcagggtgaccgaagtgtgtgactggcatgctgtcaccacccacccaccctccttctctctgattttcccacacacataataaaaaatagtcttagtccatgatcaataacacacatctctatttaaataaattatctcgggataagaaagtattaattgcattgattgtgctccaaaatcagcattcaaaatggggagtggagaccatggaaataaataactgcaaatttcttactaaataggaaatgatcccccgaatctaacctctgtttactccatgtcttaataagagggaacattttgatctttaccgtcttgctgaatacaattagcacctgattcccactttggagttaagactaatttcccatttctacctctgacacctccctcagcctagttgacttgtctgacacattcaccagatactagaaggactgccaaagaggaatttgctacccttatcttttggggacagtaataggtttttcatgaggcttgacatgggtttagaatctttggcaaaaaaaagagaggtgaaaagtcctcaaaacagaattatcgctagttttaattaaatatctttttttttttttttcagacagggtcttgctctgtcacccagtctggagtgcagtggcacaatctcaccttactgcagcctctgcctcccgggttcaagggattctcatgcctcagcctcctgagtagctgggattacagacgtgcatgaccacgcccagctaatttttgtatttttagtagagacagggttttcccatgttggccaggcttgtctcgaactcctgacctcaagtgatccactcgcctcagcctcccaaagtggtgggattacaggtataagccaccacacccagccaaaaaggaatatcttaagatcccccagatattggtacatttgaaggtttaaaaaagtgtgtctgtgatgtttgtgtggaacagcagaaactgcacagaagataaagatcctttcatcctgccccacataaagaatgccatgaccaagacaaaagattcagagctaagcattagcctcagcaatgagaattgagaatccagggggattccacttgcaaaggggccaacgaaggactctgaaatcaaccaaaaggcctgggcagaggttaagagaacggggcttgcgagtcacgcagccctgggtgtgaactccagcgtctgccttccccagttagtgctccctaattactttcaacttcagttttctcatctgcaaaatgggattgatgatagtgctagtggaggaattaaatgaggtgatacatctggagtgctcagtgtggtgcctggcccagagtaaacgttcaaaagtctttggccaccatcaattgcatcatgaaatacgttaatatgttctgtttgtctgtaacggtcgaagtcaactgcagttggcaaatcccaggacactggcctgggtcttgttctctggctgtggggcccaagactcaggccagcggggccttgtctctatgtgaatgttttaatttttttttttttttgagatgaggtctcactctgtcgcccagactggagtgcagtggcatgatcttggctcactgtgacctctacctcctgagttcaagcgatcctcccacctcagcctcccaagtagctgggattacaggtacccaccaccatacctggctaatttttacatttgtatagagacagtgtttcaccatgctgcccagggtggtcttgaactcctgagctcaagggatccacacgcctcggcctcccaaagtgctgggattacaggtgtaagccaacatgcctggccaatttttaaaattaatttattttatatatgcgtgcacccaggagtgcaatggcacaatcatggctcactgcagcctccaactcctgggctcaagcgatcctcctgcctcagcctcccaaagtgttgggattatagacatgagccaccagccactgtgtgaacttttaaatcttctctgtctttcctgcttctctgactttctcatatccctccattctgttatgtaaatgctacattcctacccacatctccattgcatgtgtaatagtcaagtcaaaatgaacaggtctgaggccaagcccctgaaaattctctctctaacctttccctgctcacagcttctccatttcagttaaaggcagctctcttcttctggatgctcagttggaaaagcttggagccactcttaactcttctttacctaacactccacgtccatcaacaaacactgtccacttggccttcaaaatatatccagaatcctggccgggcatggtggctcacgcctgtaatcccagcactttgggaggcccaggtgggtggatcgcttgaggtcaggagttcgagaccagcctgcccaacatggtgaaacccccatctgtactaaaaatacaaaaattagccgggtatggtgacactcacctagagtcccagctactcaggaggctgaggcaggagaataattgctagaatgtgggaggcggaggttgcagtgagctgagatcgcaccatttgcactccagcctgggtgacagagtgaggctccatctcaaaacaaagcaaaccaaaacaaaaatctggaattcgaccacttctccctccactgcactacttccacctggtgcaggctgccagcttctgcccccaggtaaatgcagtggcccctgatcagcctctcagcttctaccctgacctctatgatctgttccccacgcagcagcctaaacgggctggtgatcaagtgggtcaggtcttgaccgccctatggctcagaccctccagtgattccccatcctactcagagtaaaatctgtccacgtccaagtcttagatgtgttttttatgttgttattgttttcagttctctgctgtgttttgtgagaggtggcttggacggaatggcagtggtaaggatggagaggggatgaaacaggaaaaggggaaaaaagcatgcagtcacatctaacacaaattttcattctaatagtttttccaccacttcttagcttagaaagtcttcccttctctagagatctgatgcatagccagttaaaattttcatgtgcttctttcttatagagtgaacttttttttttttttttgcctgatgttatcatccctaagctgcaaagatcttaggaacttttgcttctgttgaaccaaatggctttggagaggacaggagagcaagaatgagtgcaggtcatttccccccctcctttttttccttttttttttaagataggatctcactctgtcacccaggctggagtgtagtggcacaatctcaattcactgcaacctccacctctcaggttcaagcgattctcctgcctcagccttctgagtagctgggactacaggcgtgtgccaccacgcccggctaatttttgtatttttagtagagacaggctttcactgtgttggccaggctggtctcgaacgcctgtcctcaaatgatccacctgcctcagcctcccaaagtgctgggattacaggtgtgagccaccacatccggcctcatttcccctttctgatgccaattcactttcatgtgctcaaataaaccttaatacactatcaactggctttttctttacatttatacagaatcaaaaaactacaattagtgaatgtttattaatcaatagaattatcttcctttagccagagtcaagattaacactctataactatcaatgacttttagaaagataatcaacaatattcaaatttatcagttcattttgaacatcaccagtatctgatcactagaaagactgatcatattttaactactttataagtctcacagaaaaatcctaatttagtgtagtagaccctctcaaatatgtaagaaaaaattcccttccaactctcataagttacaaactcactcactgtaagagagacagctttaggagaaaattgaacatggtgtttacattaagaatggaaataatggcactcatttctgtttaagaaatgtaactaggccaggtgtggtggctcatgcctgtaatcccaacattttggaaggctgaggcaggcgaatcacttgaggtcaggagttcaagaccaccctggccaacatggcaaaatcccgtctctactaaaaatacaaaaattagccaggcatggtggtgtgtacctgtaatccacctacttgggaggctgaggcataagaatcgcttgaaccctggaggcagaggctgcagtgagccaagactacactactgcactccagcctgggcaaagaaggaaggaaggaaggaaagaaggaaggaaggaaggaaggaagaaaagaaggaaggaaggaagacaggaaggagagggggagagagagagagagagagagatcactggaggggtaatgtggtttggctctgtgtccctgcctaaatctcatatcgaattgtaatctccagtgttggaggagggtcctggtgggaggtgattggatcatgagggtagactttccccttgctgatctcatgatagtgagtgagttctcaggagatctgcttgtttaaatgtgtgtagcgctttcccactccactttctctctcctgctcagctgtgaagacgtgcctgcttcccctttgccttctgccatgattgtaagtttcctgaggcctcccaagccatgcttcctgtgcagcctgtggaaatgagtcaatgaaacctcttttattcatcaattacccagtctcaggtagttccttatagcaatgcgagaacagactaacacaagagggggaacacatttttaaacaacagcatgctaagcaacatctcattattcaattgcgatgacatccttgtaaatcagaaagctctttaataagctgaaagataaggtatttcccatgcaaataggaagttaaaaatagatcttcaaacaaggcttctttagtcaccgggacaccaattaatgacacactgcttaatttacacaaaagccaagtttagggaggatggctatatcttccttagcattaggttttttgatactttggaaaaatgggaatttttacatctctttgtatgactggctatggggatggcaaatggtgccctagatgtgagcttgctctgccctctccctgagaggaagggagtaactgagtcagactcaagcccacagggaggcctaagcaggggttctcggtcaggcatgggtttatccagacgggactcatccaaccaagctcaggggtcaaggctaaatcccaaagtcttctcaaggtaaatacaatctttttgacaagtttttgtctttcagtgggcaccaccaaagtaaagacagaagtttaaaacgtcttgtacaacgtggagttttttcctctatcctagatttttctgtcttaaatattgatttatttatttttttgagacctggtctcactgtcacccaagcttcagtgcagtggtgcaatcacagctcactgcagcctcaacttcccgggctccagcaatccttctaagtagctgggaccacaggcctataccaccatacctggctaatttgtgtatttttagtagagacggggtttcactgtgttggtcaggctggtctcgaactcttggcctcaagtgacctgcttgccttagcctcccaaagtgctgggattacaggtttgagccgctgcatccagcagcctctcttaaatattaatattctgttttcaaggaacatgaactttggcagcacaggttcaggacccctcatcagatgcccttgcagctttgccttgtctgttccagacctgccacgcaagctgtcctccctcagtatctgccaaatgcaagtcgcccctcagctagcgctctcagcttggtccttgatggcacaccagcccaggacaactgataacagccagacctgcatccctttggtgggccagcatcactcagaccccacttgggagagttcaggtgaccccctcttgcccacctattcttggccttctccacaacccagtgaaaccagcctgtaatctcacacctgtgaagggcttggcatccttttcaagcctagtgtcgtgtgctctgtgacctccagattatggataaagatgtccaacaagggtgactctactgtagttccaaagaatctaacatgagtaaggttccaggtcattcatctctatcctgaagcttctttcagccatctttgcacacatgccaagacatcatcccccacccacaatggagctagtttttaaaaagcatcctccatatgaagtgttgtcagtgtccccactgttagccctgcagatgcttatgacacttagggacatcactgggtctgatttcttcttttcctccactgctcaatccctcttctttttttttttttcaatgctttttatgcattgggaactattatatagtttattttattattttattttattttattttgagacaaggtcttgctctgacacctaggctggagtgcagtggcacaatctcagctcactgcagcctcaatctcccaggcttaagcaatccttccacctcagcctcctgagttactgggaccacaggcatgcaccacggtgcccaggtaatttttttgtatttgcagagatggagtctcattatgttgcccaggctggtctcaagctcctgagcttaaatgatctgcccgccttggcctcccaaagtgctggaattataggagtgtgccactgcacccagcttcttatatgctttgtttaattaattttttaacttaacaaaaatattaacattattccatatttgttttaggtttatcttttgcttttgttgtgtaagaaataaaacattaccaccagaggtgaagaccccatttctttcctctgtcccaccacttaccccctagaggtaactggaagttggtgtgtgtcctttccattaagatgttgttatatctttaaagcctctgtatgcatcttaaaataagtaatagtattgttttccttagttttaaactttggaccaggcacagtgactcacacctgtaatcccagcactttgggagaccaaggcagacagatgacttgagcttaggagttcgagaccagcctggccaacatggtgaaaccctgtctctacaaaaatacaaaaaattagctgggcatggtagcacgtgcctgtggtcccagctacttgggaggctgaggtgggaggatcacctgacctcaggagggaggttgcagtgagccaaaattgtgcccctgcactccagcctgagtaacagagcaaaaccctgtctcaaaaaaaaaacaacctctacaactttgcattatgtcatactgtacgtgtcaccactcaacatgttctttctccattaatatggcctcaagatttatccatgttgatgcacatagatctagttcaataatttttgctgctttatgttaattcattatataaatatatctcaattgtcttaatccattttcctattgatggacacacaggttgtttctcattttttatcatcactatagtgctgtaataaagactctttagaagtctcctttgtacacattcaagagtatcccaaggatataaaagtaagtttgggatgattggatcaaaaagaatgcatatagtcaactttcagtagatattgccatctgaaacacgattggctgttctgacttacactgtggcttacatggtgacttcctgtttctccaatctgtttcaaacacttgtcagatttttttttttaattttggcaatataatgggcatgaaacatatcactgttttaattttgagttccctaacttctagagagttgggcatcttttcatatgcttattggttactaaaacatcctcttcatatcattgtctgtatctttagtcatttttattgagttgtttgtgtattatgtttgttcatttctcttttttctttttttttgtttatctggatgcaaatatttggtcaattatggatatttttgaaaaatcttttcccaaataggcttacattttaattttaattttaattttgatgactattgttgttaagaagttttatattctattctggcctaatttatcaattatttcctctaaatatgctgtctgactacttctatcttaagaatgtcaagataggatattctattttcttacaaaattttcttattttagcctttaatttatgtggaatatattattgtatatgaagcaggtagcaattcaattttcttttttcaagacaagtcaattttggaaaaacaagaataaaacaagcacttctactttgagtaatgcagaaccagtttccacaattagataatctgaaaaaaagtaaaatctgcttggaaacaccagagaggtccaccatgatagtgaagaattaccaggctaggatctgggaaagaatggagaccccaggtgtagagaatagcatttggggccactttccccaagaaggtatctgccaattctgaggtgggaagtctgagaagccaaaaggttaagctacaatgttgacatccttgagggtgaaagggattggtattcaggccttccaaatagggagatgactagtgagtccccaacaatttgcatagagccacaagtctgtatcctgggagtaaggaaccacagggaggctcttgcaggaactgcaactcagttacaaatcatctcaagctccaacattggattaaagtagtcccagatggctaatgtcctcagctgcttggcagaagcaaaaaataaatctattctccaggaggctaacatgatcccaggcctcaaaactttctatgaacaatattgtacatacaatgtccaaggcacaataaaaaccaaccagtccaccagaaaatatgaattaaaatcaacagaaataacagtcaatagacacatacacacaggggcaccagacattgaagctataagacacatactttaaaacaactatacttgctgtgctcaaggagatgaaagataagattggggaatttcagcactgatctggaaactaaaaacataaagaaataaaacccaactaggtggaaattcaagaagtgaaaaaaatcaatcacccaaattaagatctcagggcatttttttttccagcaggctatacacagatgaaaagataattattaatacactggaagataaagcagaagaaaatattcaaaagtaagatgaagtgataacaggctggaaaattttgaaaagaggattagagatatggaaaatatagaaagaaggtctaacataccagtgattgaagtcccagaagaaaagagagaaaatgatgacagtgactgagaatttatcaaattgttgaaaaacatccacccatcaactctgtgtcacttcaacccgggaggtggaggttgccgtgaaccaagattgcaccactgcactccagcctgggtaacagagcaagattccatctcaaaaaaaaaaaggatacatttaaagcaaattttaacagacatcaaacaacagaaatcaaagatgttttctgattacagtgtaatcaggctattaataagaagaactaataaattcctatatgtttgaaaattaaaaacccatgagttgtagaagaaattacattgtaaattataaaatcttttaattaatgaaaatattacacaccaatgtagtgggatgcacaggaaaccatgtttagaaggaaatttttgtttaaatgcatgtattaaagaaataatatctaaaagtcaatgaactaagcattcacttcaagaagacagaaaaaattaaactaaaaaaagtcaaaggaaataaacaataagaaaaagggtagaaaatacagaaccaacatgcaataaagaaaatcaacaaaggtaaaagttgttatttgaaaagattaacaaaatggaaaatccctaacaagacaataaagagggaaagtgaatgaaaacggcatgtcactatagatcttacattttaaagaggttattaatacaatatgaacaattaaatttctttaattatggaaattcttctagttatccttttaaaaaattgaattctagcttaatcacactgtgtctctaaatgaagtgaatcctttgaaatttatggtcaagtttcaacatattccaagtatgcttgaaaagaatggttattctgtagatgctaggtgcaaggttttatataggccaattaggtcaagtgtatcaatcctatttcatgttgttgttgatatttttgtttactgttctattagatactaagaaagataccataaaatctccccctatgaattaggatttatatatttgtacttgtagttttgtcaatttttgctttatagattttaagtctatattattaggtacatatatattagaattgtcgtgtcttgatgaattaaaacttttgtcactgggaagtggtgctctttggctctgtttccttaaagtctactttatctgatgttaatatacggctgtgcttgctttcttttagtgttgtatggcattttttaaaatccagtgtttgtatggcatttttaatccatcttttggattaatgtaaaaaatataaaaacattttttcataattttttgttaatacataaagcttgtacatatttctcaggcacatgtgatattttgatacatgcatacagtgtgtagtgatcaaatcagggtgattgagctattcatcacttcaaacatttatcatttctttatattgggaacattccaaatctttcttatagctattttgaaacacacaataagctcttgagtatagtcacagtagggtgactatacttaataaccaatagctaatgagcactaaaacttactccttctaactggatttttgtactcattaaccaacccctctacatctcctccttgctacccctccagcctctggtaatcaccattctactctctacctccatgagctcaacttttttagctcccacatatatgagtaagaacatgcaatattcatcattctgtgcctggtttatttcacttaacataatgtcctctggagtcatccatgttgctgcaaatgacaagattttattctcttttgtgactgaataatattccattgtgtatatataccacattttctttatcaatgcattcattgatgggcacttaggttgattccatatcttgactattatgaatagtgctgcaataaacatgtgagtgtcaatatctctttgatatatcgatttcctttcttttggatatatactcagcagtggtattgctggatcatattgccggtagttctgtttttagttttttgaggaacctccatactgttttccatagtggctgtagtaatttacactcccaccagcagtgtatgagggttcacctttttccacatcctcacaagcatctgttttttgttttattttgttttgtttttgttgttgttgttgtctttttgataagagccattttagcttggataagataatatcttattgtggttttaatttacatttccctgtcattctatttttatgttcctttatattttaaacatgtatttaaacatgtatttgtatttaccatatagatagattttaaaatccattctcacagcatttggattttagttggaacacacttcattaacatttagtgtatttattgatacatttgggcttaaatctaaaatggaatatttggctcacgtgttctatattctttcctttcttgccttcatttgaattgacacacacacatacacacacacacttttttctttcttttattagcttaaaaattgtacagtcttaaaactcttttaacgattaccctagagatcaagataatcatccttaatttatcaaggtctatattaatttatattaaattagcacttttacttctttccatataattcaagaaccttggaaaactttaactgtctttatccttctctagacttatatgttattcttgacatgtatgttatttctctttatattttaaaccttaggagacattattatacttgcttaatacaggtaaagtttatttatatttactcttatattaatcgctttttgttgttcttcactacttcctgaatgaccaagcttccatctagggcaattttttcctttagcatgtcctttagtgaaaatctgccagtatttaattctctccattttttgtttatgtaaaaacatcttcaattaatctttattcttgaaggatattctaactgtgtacaaaattccaggttgacagtttttttttctccccagtatttcgaggatatcattctagcccagttcaattttttttcattccatggttgacaagtcaaccattagtctaagtgtcacttctttgaaggtaatctttattttttctacagctgcttttaagattttctctgtctttagtttttaacagattagatagatagatagatagatagatagatagatagatagatagataaattagagggtgtagttttagtcatatttacccttcttgaagtttcagacttcatgaatctgtggcttgatgtctttttgaccaattcttagctattatcttttcatatattatttctatcatattatttctctcctttccttggaatctaattacatatatgttgagctttcttactatatccacattatctcttaccctttcttctgtctttcctattctcttatttttataattcattttggatattttctcctggcttaacttctagcatcttgctattcagatggtctatgacaatattggcatatctgggagcttgtttgaaaggcagcatcctagccccaccaaagcctactgaatctttgataaaggaatattaaagtctcctactgtaattgcagattttgtctatttcttcttgcagttctatcagtttatgcttcatgtattttgaagctttgttattgggtgcataaacacttagaatagttatttcttctatcatatttatcactgataaatgaaaatgataatgataatccctgtttttctaaaatctatttaacctgatattaatataacaaccctaactttcttttgactaaagttagcatagtatatctttttccattcttttactgttaacccatttgtgtctttatatttatagtgtgtttttagtaaacagcatatagtcaggtcttgcttttttagccaatctaggaatctctgccttttaattgaggtatatagaccatttacatttaatgtcataattgatatggttagatttaagtctattatcctgctacttgtttttcacttgttccttctgttctttgttcctctttttctaacttcttttacattaattgaatttttattcctttttttggcttattagacacgacttttattattttcatggttgtttttgagtttataatacatctttaacatattacaatctacatttaaataatattgtaccacttcacatatagtataagagtcctacaatagtatattcccatttctcccatcaaggcctttatgatgttgttgtcatacattttacataagtttacactactctgtaatatttgcttctcttattctgctatgtatttttctgctggctctttctcttgatgctttgactgtgtatgtatttttttgtatgtttttatttattcctttttacccatgtgctcatttttttagaactttatccaggcaaattcttgagattgtagtgaaggtggattcctctagaaagagaatttgtgtttgtttctgtctattgcactggagtactaccagtatggcaatactttatactaaaacttcagattaagatttttttggaccatctagacagtgtgagttttgggtgcaaactagcatgagaatctgtttgttatggcaaattttcaagggagactgaaccctgccccaatcctatactagcaccattcatattttttcataaaattccctgaggatagcaggactggtttatttctagtttgtccttgctttaaggatataatcttgaagtctcagctttatgatggatgtcttccattagacgctctgttttggataggccccaagctttgtgtcctgcattccacagcccaaaaggaaataaaacccaacttcaagttcatcttatctagtaaatgttctcaaggtaaagaagcagcatctatgctcttttctgaattccaatcttcagttgatttttggtttgagtgcttcttactttcttgccagatcattgattcatttaataatttgttaaaaaatttttttcttcatctggcatttctagttgttttccactggggatgttggccagggtccctcatccactgaactgccaataatggaagtctttcatagcaatgtttctgagacgccaaccagatcacttaattttactccttacacatctttagcagctcccaactgctcttgcaatcacacggaaactccttagcttgacatccgaaactttctgatctggcctctgcttgcttctctagcctctctgaaaggtcattatgagatacattgtaccctgcactgcattctcacacctcgttgcctttgtgtgcatactcttttctctactccaactttatggctcagcttaggtaccattcctcaaggaatctacccacaactcagtctgggtttatgtagtcatggtctgttcacagacattaccatgcttacccttactgcactgtaaaccaactaagtgctagatcagtccctacagaaaccacataggctagtccataataggtgttgctctattttgaaggtttgtcccctaaacctcatgtggaaatttgatccccagtgttgaaggtggggtaatggaaggtgtttgggtcatgggggcagattcttcacaaatgacttggtgccatctgcgtggcagtgactgagttctcactgtattagctcccatgggagctggctgtttaaaagagcctaggacctccctccccctctcctgtttgtcccctctctcttgcttctctcaccgtgtggtctctgcacacactgtctccccttcctcttccactacaagtgcaagcagcctgaggcctcaccaggagcagatgctggaaccgtgcttcttctacagcctgcagaactgtgaaccaaagaaacctattttctatctcaattacccagtctctggttttccttttagcaacacaaacagactaagacagatatttaacaaatatttcttgaatgaatgaagaaatgaatgaatgaatgagcaaaccgttattgccatggtgcacatgttactgagagttagagtggacaaagaagagtttataaaggataggggatttgagccagaaaattttataatatttaaacttaaagaagcttcaggtaaccttaactgaatactaatttttaaagaagttcgaagtcttaaaatttctcaccagtcatatgttttgaacctcttctgcaggaaaaccttagtcagttaaattgaagaaggattgtcttcacaggctggcatcttcctaccaaaattctgagcagcacaggatgcccgtttctgacttgcttaagaaaacaacacagtcaggtcaggtcttaccaagcacagcaaaaatgaagcaagaattgttgttggtgaatagggtggaattgggacaagtaggaggaggttttaccctttttcataaataaggtggttgattttgtactggagctgacctgaatataatgcagttggtagtgttgatctttacttacattggctgcagagaactgtccttgctctttctttccccttccaagactgtctaccagctggacttttaccatccaaaacagtccaatctgaaatacaaacccaggacacgtgaaaacaccaactgggacaagaaatcatatgcaaagacattaattttcacttttattgttccagctgttttactgttaattgatacaacctatttattcataaataaatgtattcacagcaaaaatgtggataatcaaacctgatataaccatctgcctaaagatttaaatttcttcaaccttagaaaattcttaaatgcaatgattattcagtggctggaaaggactcttcttaacttatagtactttctgcagtttggtgaagataagatttcttaatttggtaatttggggtagattagagtgttttcataatgtcaagctgaagggtcaaaaataattaaggatacaaagtattattcaattattatgctaatacatgtatctggtgaccactatgaagcaaaaaaaaaaaaaaattccatacatttgatggcatttgcaattttgtatattaaagcttatggttactatattgctacttactaaaaaccaatagcaaataaagcaatatcaatattcaagaaatgagcatgataaaatgatgtgattaaagccaaatggaggccaggcacagtggcttacgcctgtaatcccagcactttgggaggccaaggtgggcggatcacctgaggtcaggagtttgagaccagcctggctagcatggagaaaccctgtctctactgaaaatacaaaaattagctgggcctggtggtgcacatctgtaatcccagctacttggaagactgaggcaggggaattgcttgaacccggaaggcagagattgcagtgagccaacatcgtgccactgtactccagcctgggtgacagagcgagattccgtctcaaaaaaaagaaattcacaagtgagtagaaactcacaaatgagtagaaacttacaaatgtataaaataaatgttagttaaatgctccagttctgtttggttgcataacaaattaccccaaaatttaggagattaaaacagcaaacatttgttatctcctacaggttctgaggttcaagaccctagaagcagcttagctgggcagttccagctcagagtttctcatgaggttgcactcaagctgttgcctggggctgcagtcatcctgaggcttgactggggctggagaatccaattccgagctcactcacatgctgttgttatacctcagtttctcactggctgttggctagaggcttcttctcagcataatactctgcttaggactgcccacaacatggcaactggcttcctttggcctgagccaagagagagcccccaaggtgaaacccacagtgtcttctatgaactaatgttggaggtgatacaacatcactccaccatatgtcattggtcacatggactaatgccagtacagtatgagagaggactacacagggtgtgaatactgggagtaggggtcattaggaaccatcttggaggctatcacatcaaatgaataaacacatcctttaggaaacttgtgtagcctatttatctggtttccctgaggaatttacccccaagatactcctggccccttacccccttctcccaccctttactactcaaggggtacctggatagtgggtcatagcactggtccacatttcttgcctggatggaggtcatctattaaaatttatgagtaaaactaccttcttctctctgagctagttcacgacagaaatcttggttaagtgaatccactttgcagaccaaacttgccttcagatggagagttccaaggtctaaactggctacagagagtcagagaagccactggccaggatgtctggccactcttttcaatatattgttgtgatggagatgatggagatgatatttaatctccattcatctgattctcatttcttcccttggttggttctgaactcagctagggaacaaaggcattctttatcagcaactcagaccccaactagaaggaatgccttgacagaatgagaaaacatcatccaatggcactggggcattttatataatttcagctgactagatccaatcatcagcttaggaatttcattcattgattgtcctcactgacatggaagaaatttttaatatattaattaggctattttttttttcctggaggttcaaactcttaaaattgtcctttatttttgtagtggtgctttctccctatgggatgcaaaattggaaatgaagccatggcattgtaatgcatgcagagttttagttattggcactccaattgccacggaataatcaagagatgcaaaaggattgttactttctaatgttcagtcacttctgcttctgtttttgcataacactggactccagctgaacctacctttgtgatctgattcatgggttcctgtaagatattaatgtaattcctcaattttaagatacatttcctcccacctcttaatgtttctgggatcaagatgtcaaaagaaacttgccagtgctttctttcgctattaaaggtaggatgcattctaaaactagtgatgttttggaatcaaagaaatgtaaatgtaaggcacctgggctgatggcaatcttgcagcttgaactgcctaagtgagagttgttcaacaataacatttggtatgttttatctgacggtttttgatatgtaacgtggctgtgtctcctggcaatcttgattggtttttatttctaggagggttgacggtttcttgggagatttggagaatactaaatcaagaacttgtctagctggataggccattctcacagacatgggtgggaaattcactggaggacacctgatacccttggttcctaggctgtccttaattcctgcaggggctatctaaagagtgagcctttcatgttgtgtctctgagccctcaaacttgaccttactgtacttcctgctaagtgacatggaaccaggacccccagagaactgttagagggaagaagttgcttaggatatctaaagcctagaaacacagcctggaggagggcctttggttggaagagtggaatatgctgtaatatgtctaagaaagcagcagtgagtgatactacctgtgaaagaggatggaagatgacaagttgcagcccttaggaattaagaatagtatgtatgtcagaggcatttgaaccagagcaactccatcttgaataggagctgggtaaaatgaggctgagacctactggactgcattcccagacgattaggcattctaaggcacaggatgaggtggaaggtcggcacaagatacaggtcataaagaccttgctgataaaacagtttgcagtaaagaagctggccaaaaccccaagatggctgcaagagtgacctctggtcatcttcactgctacactcccactagcaccacgacagtttacaaatgccatggcaacatcaggaagttaccctatatggtctaaaacggggaggcacgaataattcactccttatttagcatatcttcaagaaataatggtaaaaatgggcaacagcagccctcaaggctgctgtatctatggagtagccattcttttattcctttactttcttaataaacttgctttcactttattctatgggctcgccctgaattcttttttgtgcgagatccaagaaccctctcttggggtctggattgggacccctttcttgtaacacatatatgtttgtgtataaaatagggaatgaggtcagcaagcagctgacattcccaactacaccaagcatcactacaccaatgcaagaaaaagaaagagtcagaaaagaaaaaaggtgggggagaagattggattcaccctggaagagcagtattcatggcttaatgttgctggctaggaaatatgctcccctcactggaaagtatttatattcaaaagaatttctgcattggatttatctagaagcccaggcagaggtgaaggtgaatataaattagagacaaagagtctgctataagccataacatgacccaaggcagagcaaaggattcactagcaataagacagcaccacccagctcaggaaagggcacagctccaggccaaatagtctcatggcaatttacagaagctttaatttggatgtgcaatgtaagggcagttattctgagcaattctattgttgcgtgtgtaaaatgatcccttatgtggcctgtgtagatttatgttattcctgcataatcagatagcataaagaaaatgcccattccatcttttggggtgttacccacacccaatataaaggtgattccctaccagccatgtttgtaccacatgaccaggctctctggccatagctggctagatcaggagcagacaagtgtctggctgagccagtctgacactgagaatgaggatctgtgatatagaagaaaacaactaatgtgcttttttttttcttattctcatactcaacaatcaacacaggatatttttgtggctgggtacaggggtgtacttccccacacaccaagcagccaattttgcagtttctccaggagacatcagctggttgtcctctaattcaattcaattccatcccgactctatctacctagagatagcatcagatcctacagggtgaggactcagtcccacatgacagtcacagccaggcagatactagtcgcaagcacaggctgtgacctgttcttctcaccaacgagctgtaagtcagagctcccacaactctcttatggggtttgattaatgtgctagagtggcccaacaaactcagagaaacaccttccttactttaaccagttgattaataaaggacacaggtgaacagccagatggataatgcctttccataaggcaaggtatggaaggacagacatggggcttctatgtcctctccagatgtaccaccctccaggagcctccaggtgttccaccatctgcaagcccatctgaaccctgtccttttagggttgtatggaggctttattacataggcatgattgatcacattgttggccattggtgattaactcaacaaccttcaccccctctcccatccccagaggcagggggaggggctgaaagtcacaactttctaatcgtgccttggcctacccagcgaccagccgccatcctgaagttgcctagtggcccccggccacctatcttcacattagcatacagaagatactcttatcatgctggagattccatgagtcttaggaaccctctgtcaggaaacgggaagaagaccaatatatatagattgtataattcccagtatcccacagaggaaccacttctacctggattgtctccttaaatgacaagacatgagaccaggtgtggtggctcatgcctgtaatcccagcactttgggaggccgaggtgggaggatcacttgaggccaggactttgagaccagcctggacatcatagcagaccccatcgctacaaaaaaatttttttttaattagcagggcatggtggcgcacacctgtggtcccagctactctggaggctgagatgggaagattacttaagcccaggaggtgaaggctgcaccgagccatgatcgcaccactgcactccagcctgggtgacagatcgagaccctgtctcaaaaaaacaacaaaaaaggcaagacataaacctggaacttggggtgtgtctatcacagcctctgcggcaggaagagaggaatgagcacactccccaggggaagtagaggctagggacctagagagagggaaagaacataggtatgaagggtcctggtggatcctggctccagtcctttctgaagctgcatggccatctctggactctcttagatgacctcacaactgtacaatggatgtagttcccccatttacttatgctagctttaactagtctatgttacttgccaccaagagactaagattcttaactaagacaggccacaggacttactataacttaatatacctcacattctccttgcctaacttcgatccacatgttccttcctcccttccccttagacctctcctagtccagagtgggtcagcaggatgaaagaacgggagaggcagtgttaatatagaaatggatcttgtaggccaggcggtggctcatgcctgtaatcccagcactttaggaggctgaggcacgcggctcacctgaggccaggagttcaagaccagcctggccaacatgatgaaaccctgtctttactaaaaatacaaaaattagccagatgtggtggtgtgcacctgtaatcccagctatttgggaggctgaggcatgagaattgcttgaacttaggaggcagaggttgcagtaagccaagatcacgccattgcactacagcctgggtgacagagtgagaccttgtctcaaaaaaaaaaaaaatggatcttgtagtaaaaaagaaagataactttcaatataagagaaaactattatgaccttaattcctgctagctatatttcagcttcagagcagtgacttatacatggtggtactactcaatatttattcaactgaatttaatgtgactgaatttaatgtctcaaactaatgtccaaagctgagcatcatatttcataggatagcattagaggcattctcagtgaataaggaaagagaaaagaatagtcattattcctgttatttaatgttgtcccagaaataccatttagtatactaagcaaggaaaagatttgaaataaaatgctttgtaaagtttcagaaggatggagtagatgtacttttccttacttcttcagctaagtacaacttaaaacccttgacattatatataaaatgaacagaagaaaaccccgaaaggtggagagagaaaaaatagactctctagggacctcaggacccaaggaacaatatagtaatgtgttctttggattttgttttaccttaaatatcctagacatgtagctaaagaactcacaatccagaaacaccaaaatgcacagacaaaaaacaaaaatgttccaacaagacatctgctttttctagccaaaggaccaggaaagagacaggctagcaagacagaaaacttttagacaaaagccgctttactccagccacataccacagaaaaagcctcaccctgccagaccagcaaagggtgaagaagagcctagacctccaccaccaccaggctgtaatggggtgccccaaaccacctgccagggcgatgtcaaagaagaacgagtagggagctgatattttcatccccatctggcagtaatgaggcacttcttactctccccactggagtggtatcagacaagacctaaagaagagtcaagactttcacgactgcccagcagtaatgaggccacctcaacctttcccccatggtgtcagaagaggtcacatggagagcagtaatgagacacctttatcccttcccagctcatgggaaacttgaactctcatccccaaccaacagtaatgaggagtctctctatccttggatgtcaacagaggtcacatagaaacctgcactttgaccaacttttggtagtaatgaggcagcatcccctttctcctgctggagtgttgtcaaaagggactgtctaaaatagaaggtttaaataagacccagattctcataacatagtacccaaaatgtgcaggtctcaatcaaaaatcactcttatcaagaaccaggaaaatctcaacttaatggtaaaaagacaatacgtagatgccagcactgagaggacggatgttaaaattatttgacaaaccttttaaagcagccatcataaaatgtttcaacaggcaattatgaacaagtttgaaataaatgagaaaatagaaaatctcaacaaataaatagaagatataaagaagcagcaaatggaaattttagaactgaaaaatacaataattgaaatttaaaaaattcaatggatggtctcaacatgaaggggacagaggaagagggatacaggaaggaatcagtaaacttgaagttagaacaacacaaattacccactctaaacaatggagagaaaacagaccaaaagaagaaaaaaagaaaaaagaccagagacttagggacttttgggaccctaacaaagatataacattcatgtcatcagactctcgaaaggaggggagaaagagggtgagactaaaaagtattcaaataaataatggccaaaaattccaaatttggcaaatgctatatgcctataaattcaagaagctgagcgaacaccaaacagaataaactcaaagaaatccacaccaagatacataatagtcaaacttctgaaagcaaaatgcaaagaatgtatcttcaaagcagtgagaaaggacaacttacctataggggaagaacaatttgaatgactgcagatttctcctcagaaacaatggaggtcaaaagaaaataacatgacaaatttcaagtgctgaaagacaaggactgtcaactcagaattctatatctagtgaaaatatcctttaggaatgaaggggaaatctggacattttcagatgaggaaaagctcagaggatgttttgctagcaggctaatataaaagagtggctaaagaaaactctccaagtagaaatgatatgataaaataatgagtcttggaatatcaagaaggaataaagaaaaaaggaaagagtgaaaatttggatcaatacagtacatttccctcacctcttgagttttctaaattctgtttgatggtcaaataagaaattacaacattttctaatgttataattgagatgagagttccagttccccactagttttaaatgtgtgtacaggaatatttaagacaattacaaataggggagggcaaaggggcataaaaggaggtaaggtttctatgcttcacttgaactgttaaaatgtcaacaccagtagttctgtctatataatgtctatataataagttatatctatataatgtaatacctcaagcaaccactaagaaagctacacaaagagacatcctgaaaaaaaactatagatgaatcaaaatgaaattcaaaaaaaatccacaggaatacagggggaaaaaaagagagaaagaaaaaacagaaggaacaaacagaaattaaaatagcagacttaagttctaatatgtcaataattacaattaatgtaagtggcctaaacatgccaatgaaaagaaagagatcagcagaatgggttgaaaaatatggcccaactatatgctgtctactagaaactgacttcaagtataatttaggtaggttgaaagtaaaaggacctaaaaaggtatataacatgcaaacattacttaaaagaaaaaaggaatgggtataatcatatcagaaaaagtagacttcagagcaaagaaaataaccagagacagagaggtacattacctctctgttgataaaagggtcaattcaccaaaaggacatagcaatcatgattgtgtatgcaccacacaaaagagctgcaaaatatgtgaagcaagaatttatagaactgaaaggagagatacaaaaattcccaattatagttggagacttcagcacttccctctcaacaattgatagaaaaacgagacagaaaatcagcaaggatatgggagaactgaaaaatacaaccaaccaacagaacccagccaacatttacagaacacccaacaacagcaggatgcacattctcttcaagtatccgtggaacatattccaagatagaccatatcttggaccacagaacaaacttgaacaaatttaaaagaactgaaatcttacagagtatagtttctgaccacgatgggatcaaactagaaattaacagcagaaagataataggaaaatcttcaaacatttggaaactaaacaacaaacttctaaatgatcagtgggtcaaagaagaagtctcaagagcaatcagaatccactaaaaaaactgttagaactgataacaaaggccaggtgtggtggctcatgcatgtaatcctagcactgtaggagatcaaggcaggcagatcacttgaggtcaggagttcaagaccagcctggccaatatggtgaaaccctgtctctactaaaaatacaaaaattagccaggcatggtgggggggcgcctgtaatcccagctactcaggaggctgaggcagcagaattgcttgaacctgggaggcagaggttgcagtgagccaaggtcgtgccactgtactccagcctgggcaacagagcgagacttcatttcaaaaaaaaaaaaaaagaaagaactgataacaaaattttgcaaggtaatcagttacaaaataaatacataaaaagtgatggttcacgcctgtaatcccagcactttgggaggccaaggtgggtggatcacttgaggtcagaagtttgagaccagcctggctaacatggtgaaacctcgtctctactaaaaatacaaaaaaattagccaggtgtggtggtgcacacctgtaatctcagctactcaggaggctgaggcaggagaatcgctggaacatgggagaatcactggaacccgggaggcagaggttgcagcgagcagagatggcaccactacactgcagcctgggagacagagcgagactcagtctcaaaaaaaaaaaaaaacatgaaggcaagataatcctagtcacaacttctgtatagctatagtaaccaagtttgtatagtattttctatattcttgaataagtagatgtaatatgggaagaaatccattaatcctcagataaatctgtaaatataaagcaattccaattaaatccttatggaattcgcctggaaaagaaacacctgactcaggcgtgaacattatgcaaaatggggtgagagtcaccataacagatatagacatgacttataaagtttcaataattaaagtattttacagagagaggccagtgtaacagattagaaaacctagaatcaggtccaagtgtatgtacgaatttagtataagtacataaatgttttatatattttgactggttttctaattattcatggcagaagggtaaatcgggcctctttatctcccttaggccagaaacagacatccctggctgctttcagagagtagactgcagagggtctaggacataaaggggagacccactctggggtctgtggggatccaggtgagagttgaccatagtttggaacaggagagtaacagatctctacaaaatgtgctttgattccaaatgagtttggaagacaaaaaagacagcttgctgatgaattacatagatatgggggtgagagagaaaccatgggttccaggatgacacagctactggaagaatagaggcgtccagtcctgagatgggcaagtcttagggtgattcaggccagcacctattagacatccaaacgaagatgtggggtatgcagaaaacacagaacatgcagatgagcaggcacatctgtttttccaactttccatcatgcattattctacttttatatgattttattacctgaaaaagttactgaaaaagccattgtctatatttcattgaattcagaacttcaggattatcctcatttctcaagttagcagatttgccctttaacagttcaaaagagattgagagtggctcatgcctgtaataccagcactttgggaagctgaggcgggtagattgcccgagctcaggagttcaagtccagcctggggaacatggcgaaactccacctctatgaaaaatacaaaagattagccgggcatggtggcaggcacctgtaatcccagctactcgggaggctgaggtgagaagatcacttgaacccaaaaggtggaggttgcagtgagccgagatcatgccactgcactccagcctgggtgacaaagccagactccgtctccagagagagagagaaaaatgcatgtgaatgtatgtgaggaggcagactcagaatttagagtcctggagaaaccctccccaggaggaagtggggaccacacagcacagctgacaggcccacactcccactgaggaagacccccaccctcccaagttttcctttttctccttttttaagtgcagaacccaaagagggagaaagactttccctcactctgctcacaaagacaaaatggcagcttaaacatgggagagacctggttagaccaaacattccagacaaggaagtgggttgaatgtcataaacatttattgagcccttgctacttgccaggtataggcaagtacaagctacaaataggaatataacaaggaatttgtaatgcggtagggagaaaaattaaaatcatgagcaagaaggggaaaggatttgcaactttatcaaatgtgtagcttttaactatcgccactatcgagaaccaaaactttttcattaacaagtttatctcatgccacccctttagagccacatcctaacccttgataaccactaagctgttctgttatttcaagaatgttacaagaatagaatgataccgtatgtaaccttctgagattggatctttacatttaccatagttcccttgacatccacccaagttccaagttgttgcattaacaatggtttcttttttaaaaaatttcaacctttattttggatacagggtacatgtgcaagtttgtcacttggctatattgtgtgatgctgaggtttagggtacagatcccatcactcaagtagtaaatatagtacccaataggtagtttttcatccgatgctctagtggtccccagtgtctatcattcccatgtttacgtccatgtatgctcaatgttcagctcccacttacaagtgagtgcatatggtatttggttttctgttctgcattaattcacttaggataatggcctccaggtgcatccatgttgctgcaaaggacataattttgtcctttttccgggctgcatgggattccatggtgtatggatgccatattttctttatccaatccaccattgatgggcatctgcattgattcatgtctttgctattgtgaatagcacagggatgaacatacgagcacatgtctctttggcagaatgcctgtgtcttttaattgctgagtctctcactctgctttatgcccctcaaatgaattctttccttcaaggaggcaagaatcaagttgctacagacctgtatggatttgctgctgctcacagtatgagtatgcctggataattcaggtctaactcagggctaactacagcatctcatattgggaaccttgctctctaaaggcctctaagctcacaaatattgtgaaattgtagggaaactccaagatcccctaaataacggtgaagcagagtggcaatagaggattaggacctaaaagtttcacatgagctgcaaaagacacaaacagtctacatgaaaaaaaaccatgtgctttaagaactacctaagattcctgggcccaatatagtggaccaggcagttatgatttatgttctctttgccttagccagagacccaacaggaaatagaaagatactcaaattgaatcgctcaaggagagtttaataaagggattacttacaaacatgtgggcagggtatggagaaacacaaagcatgggcagtaccccggggccagaaaaagcaggggtcctttgccgtgactggcttggaaaggtgaggctcctgccatctcaagccagaaggctgtgtcaagaggccaccatgaaaaagctgtggcccttagtaagggactcagccagcctgagacaacctcacagggaggttgttgaaggcataaatgccctggcctcactttttcctctttctgaccttctgctgggactccccattggctgaatccaaccagaaggcaaagggaaggaagctggttaatgtgtctatatggtcagcctcttcaaacaaagataacggtgggaaaggatgaagatgagatgggaggactggcaaatggaagacacctggcatacccttcctcctgacacccaggggaagtgatggtaaaagaacagaaaagattcactctcacactatgagaacaggagagggatcactggtgggtcactgagtttccccaaagatttagttgaaaggtatagacagatgtgaattagctggagagggaaggcagagaaagccacagcttgaacacaggtcgggggggtctgtgtctgagagtaggaaactgcccatgagaagttctagtttcagaagtgtcaagcttgacaaccaaaaagtgagcagtggggctggcaataggggaaataattaaagggtctgtattctgaataatcaaccctgccgtatgcctcctcaattccaaatgctaaaaaggccagcagccaggtaataattctgcccttggcagatgggcataacatcaatcttcaaggtaacaggagctctcaacaaaggggggcaagctgaatgtagaaggcccaacctgaattcaccattgtaaaatttcagaataccaagaaaagacttctgaaagaagaagtcagctatgcaaaataaaagaatcagagtcaggttacttttcctgtgagcaatactagatgctagaggacaatgcggtgtgactttcagatttctgaaggaatttattttatacccagaattctatacccagccaaattatccaccaagttcaaggtaaaaataaaggtagttttcagacatgccaatactcggaaagtttctctcccacatacctcttctggggaagttacttaaggatttagtcttgcctcagaaaggtctagctgacatggaagaagacaaggaacttggagagcaggaaggaatccaaatgtcagttgtatggcagccagaggagccaccatccctgcctggagcatcaaaacaacaggcttcagatgggagatgtccaagggaaaaagtgagtgaattccatgggagcctatgactaggctttgtaacggtcgagaatgtgaaaaatgcatagaatgcaaggcaagaaaaaaaaaaagacagctagagtctctaggaaaacctaacagatgcgtaataaagtcataacaaaatattatgaaatcaggacagatttgagcagaagtcagtggagttagaatacaataaattatatggaatttattggtaataggaaaaaaacctggaagttattagtgatacaatgaaaaaaacacgtttcttccctcatcaagagcaaagaagggtgaccagcaaaggggatgggggaaattatacaagaaaggtgtcatctaaacataatgtagaaaatatgtcatgaatgtgagcaattaatcaggtgtaagaacaaattcttttggacattcttctgtgagtagcacagaagtgggaatattaagatagctgggaagaatgtagtcatcgattcttcttggctctggagcaaacaatactgtttataacatacatgtacttcagtggcccacctgtgatccctctcctgttatcgaagtgtgagagtgaatcttttctattcttttaccatcatttccctgggatgtcaggaggaagggtatgccacatatcttccatttgctgctcctcccatcttctcttcatcccttcccaccattatccttgttccaggaggctgaccgtatagacagacatattaaccagcttccttgctgtgtgccttctggttggattcagccaatggggagccccggcagatgattagagagagaaaagagtgaggccagggcatttacttgctgcctgggactctccccagatattctcatggcttattcccttacctccttcagggttttcctcaaatatcaccttttagagagagcttttctgactattctatctaaattgtgacacacacacatattccctatacaccttatagcttaatgtttttctaagcacagccagcatactacatattttgcttcttcatcttgttttttatctcccacattagaaagtaggttccatgaggacagagattttctactcttatgtttattgtggtttctccaccaccaggggcagggacttgctcagggtaggaactgaataaatatttgttgaattaataaatgttgaataaagttgtaggcaagtcacttaaggaatatttgggtttgtgtgacagaaagtaaacgtcattacacttggcaatgtaaaggtaaaagcataggccaggcaaggtggctcacacatgtaatcccagcactttggagtccaaggtgggcggatcacctgagggcaggagttcaagaccagcctgggcaacatggtgaaaccccgtctctactaaaagtacaaaaattagccaggcatggaggtgcacacccatagttccagctactcgggaggctgaggcacaagaatcacttgaactcaggaagcagaggttgcagtgagccaagatcatgccactgcactcaagcctgggcaacagagtgagattctgtctcaaaaaaataagataaaataaaataaaataaaggcacagctcacagaagttgggggctgggaaggcaaaaaaatgcagaaggaagaagaaggttaggagtgctaatattctcaatttattatgtggacaatcaagatactattgataaaataaaaagtaaaggtttaataaggttacttaaccttattaataaccttataaaggtagcaattaaaatattcaaacataataatgtaatcatattggtatgagtgagccagagaaggtgaaagacatagattgagttaaatttcatccaaatttcaattcaacatagcaaaaagctactatagtttttaagttgagacatccagaagtataagcataagagtagtatttagagtatggcaatgaacttaacaaccttatactagaaatagttaaacacagtggctgtgatatggtggtttcaataatgaaagactacattttatcaaactaatacttctatagataataattatagactctggacaaaatgtaaagaaactatctgaaggcattagaaagtgacccaaagcacacatacaaatggcaactgcaataggtaagatcaatgtccttaaattttccctgaaggcactctctagtctgcaagaggtagagaagctaaaaatgaaacagaaagcctgaacagcaagagaggctgaaaattgagggggagaaaacccaggggaaaaaaaaagaatccaaataaagagtccttaaatttgcatataaactcctctcaaatccttagctgaactgtgcacattcagggaaactctaggaagccttctgaaaggcaacagctgggagactgaaaagcttgagcagagatttcaactgtcacccactacaggagagacagtttggatttggaatcctaccaagttagagggacttagcaaacactcaggctttccatcaaaaccacagaagggctgtgatttagaaggtagaatatgccccaagactgaggggttaccctgagactaagaggaaaactgaaacacacttacctaacgaagtctgaaatgaagaatcctcaagttcatggtgacaggccactaattagactgcttgatagaacaaaaagaaacaaacttcagagacgtataaaagaatctagagtttctacagtgtgtcatgcaaaatatccagtatacaattaaaaaaaaaagacatacaaaaacaggaaaatgtggtcaatagtcagaaaaaccttactcaataaaagtagataatcttgttaaaattggtagacaaagatgttaaagcgaagatgttaaatattcaaagaattaaaggaaatttcagcagagaaatgcaaactacagaaattttagaactgaaaagtaaagtatctgaaataaaaaatgtactggataattttaacaataaattagatactgcagaagtgagagtaagtatagtttaagatggatcaacagaaattacccagtatgaaaaacagaaataaaaagttgaaagaagaaaaaacactaaagtctcaatgaattctgagagaatatcaagtggtctgacaacatgtgcaattcaagtccaagaaggaaagggcaaggagcaaagaaaatttgaaaaaataatgccccaaatctctcaaatttggtaaaacaaaaaacaaacacacaagcaaagcttatacattcaagaagctcagtatgtaccaaaaagagcagatacaaagaaaatcacacttagtcacatcataaccaaaccacccaagctaaatataaaaagaaaatgttgaaagcagccagagagggaaaaaagacacattacacacagggtacaaagataagaataatcactggtgcctcataagaaataatgaagtccaattgacaatggaatgacatctccaaagtgttgaagaaaaatgtcaacactgagttctatattcagtgcaacagagatggaataaagtcatctgaaaatatctttattccatccccaaaatgagattgagtaaagatattttcagataaacacaagctaaaagaatttgtcaccactagacttgtactacaagaaatgctaaaggaagttcttcaggctaaaggaaaatgataccagatgggaacttgaatctacaggaataaagagcgctaaaaatggtaaacaactaggtaaacatacccaggcttttttcctcccataacttgcttttaaaaatgattatttaaagccaaataatagcactataaggtggggcttacatagtacgtggaaataaaggacatgacaagagcataaaagatggcataagagactagataaataaaatgaatctattgtaatgttactgtatttgtgaagtgtgagatatgaactctaaagtgggaacggtaaggtatgaaatgagaggtggtagctgtgaaattttcagtgagaaatgatacaatataaatctaaataggctttgacaagaatgcacgttgctagttttagagtaactattaaaaaataaaaacagctttaaaaactgtagctaaaaaaacagtaaaggaaataaaattcaattcagaaaacattcaattaatctaaaagaaggaagactaaaatgatcaaagacagaggaagaaaacaaaacaaataacaagatgctagacttacactcaactaccccagtaattgcattaaatgtaaatgatatatttatttcaattaaaaggcaaagaatgtcagattgtatacaaaagcagtatccaattaaagctacctatataagatgaactttaaatataaaaataaagtgtggttaaaagtgtggaaaaatacattccatgtacacagtaaacattaaaaggctgccatgcctattttaacatcaaaaaagtagacttcaagacaataagcattactagagacaaagtggcatatttcataatgataaaagagtaattcattaagatagtataattgtactaatcgtgtgtgtacctaataacagaacttcaaaacagatgaagtaaaacctatcagaagtaaaggggaaatcaatgtatcgaagagatatttgcactcccatggttgttgcagcactgttcacaatagccaagatttggaatattttaagtgttcatcaacagaagaatagataaagaaaatgtggatatatacgatggagtactattcagtcataaaaaagagtgagatcctgtcatttgcaacgacatgaatgatactagagatcattatgttaagtgaaataagccaggcacagaaatgttatattgggtagctagtctggtattagcagggaaggaggggcctccccacaaaacacacacacaccagcagtgtcaagcaactatcgggtgatggtcaggtggttgttaactggtctctctaaagtaataattggtcacagacagtgccagggacaggcagtctcctaatagattaaaaaaaaaaaacacctgaaagatgatcagcagcttcccgataagatctcaggagttgggcgagtggggagaagtaacataagactctagaggaatgccaatgtataaagtcaaaaggttgagctgcacacttgcctttcaagttgcccactggccttcttccaagtagccaagtacttctcttcctttcattcctgtttgaaagcttttaataaactttcactcctgctccaaaatttgccttggtctctccttctgccttatgctcctcaaattctttcttctgaggaggcaagaactgaggttgctgcagaacctcacggatatggattcaccaccggtaacatattttggtgctgtgtgattcagataccttccaccagtaacataaagacaaacatcacatattttcatttatttgtgggagctaaaaatcaaaacaattgaactcatggacacaatgtaaaaggttggttaccagaggctgggaacgtagtggggcagagtgggaaggaagtggggatggttagtaggtataaaaaaagaaatagaaagaaggaataagacctatgatttgttagcacaacaggatgactatagtcaataataacttgtttgtacattttaaaataaccaaaagagtgtaactggattgtttgtaacacaaaaaataaatgctgagaagatggatacctcattgtatgagtccatttttacacagctgataaagacatacccaagactgggtaatttgtaaagaaaaagagatttgatggactaagagttccatgtggctggggaggcctcacagtcatggtggaaggtgaaaggcacatcttacatggctgcaggcaagagagaatgagagccaagcaaaaggggtttccccttatgaaaccatcagatctcgtgagacttattcactacccctccccatgaggaaaccgcccccatgattcaattatctcccaccgggtgcctcccacaacacatgggaattatgggagctacaattcaagatgagatttgggtggggacacagccaaaccatatcactcattctccgtgatatgattattacgtagtgcttgcctgtatcaaaacatctcatgtaccccataaatatacacacctaccataaacccacaaaaattgaaaactaaaaaaaatcttgagaaaagaagtaaagggtcaagtcaacagcctctcacaatcacagttggctatattaacacccttctctcagtaactgatagaacacataaactgaaaatctaaagaacactatcaaataattttatctaattaacatttactgaccaccattcttaccaaattcagaatgtacactgttttcaaattcatgtgcaacattcaccaagataggaccatatgctgggccttaaaataagtctcaatgaatgtcaaaagagaggatggtcttaccacacaatatacaattacgtcttacaattacgtcaataattgtaagatatctaggaaatctccaaatgtttaaacagggtacttccaaacaaactacagctcaaagaataaacacaatggaaattataaagtatttaaaagtgagtgataattcaaacaacacacaaagttagaaaacatagttaaagctgtgcttagagagcaatttacaatgtaaatgtctatgttaggaaagaacgaattaaaatcaacatttaaagttaatattttaagaagccagttaaagaaaaacaaatacaaaacagacaaaaagaaaaaaataacaaatccaaaatgtagttccctgaagtgattaataaattgataaaaataagtaggactaatcaagaaaaaaagagagaagacacaaattaccaacatcagaaatgaaagagaaaggtcaggtatggtggcacatgcctgtaatcccagcacttccggaggctgaggtaggaggattgcttgagcccaggagtttaagaccagcctgggcaatatagtgagacatcatttcttattaaaaaaaaaaaaaaagttaaattagcttgtcatggtggcccatgcctgtagtcccagctacttcggaggctgagatgggaagatggctccagcccaattaagtaaaaggacaattaagtagtggttaaatttcttgaaaaacacaatttaccaaaggacatttaagaagaaatggaaaatctgaattgacttctatctataaaggaaattgagctcataatcaaaaatcttcccacaaaacaactccaggcccatgttatttcactggtaaattttatcaataactttaaaggaaaaaataataccaattttatagaaaccttttcagaaaatggagaaggaaagaatgctttcaaactcactttatgaggccagcataacttttatatatttgtagccctggtaagtataagttcatttttcaataaagatgcaaatgttattcaatgaagtaaagaataatcttttcaataaatgataagaaacaactggatttctatatctacatgtctttttatatataaatatggttatggattttttttttttttaagacagactcttgctctgtggctcaggctagagtacagtggctcaatttcggctcactgcaacctccacctcccgggttcaagcaattctccctgcctcagcttccggagtagctgggactacaggcgcccgccacgcctggctaacttttgtatttttcagtagagatggggtttcaccatgttggccaggctggtctccaacacctgatctcaggtgatccaccaacctcagcctcccaaagtgctgggattacaggcatgagccactgcacccagccggttatggatttttaaagagaacctcacttagttcctcacacatatgcaaaaattaatttgaaatgtatcatagacctaaacttataagataaatcacataacatataaaaatttttcataatcttgaagtaggcaaagatttcttagaacacaaaaaacactaactgtaagagaaaaaaaattggaagttgaacttcatcaaaattttaaacctcggctaagcaaaagattgccaacaagacaaagatgcctacttttataacttctcttcaatgttgtactggaggttctggccagggaagttaggcaagcaaaagaaacacaagacacccagactcgaaagtctgaaatagaactatctttattttcagacaacataatctcatatacagaaaatcctttaaaaaatctatttttaaaaaatgactaataaatgaattcagcaaggcggcaggataaatcaacatagagaaatcaattgtatgtctatacgttaacaatggcaatctaaaatgaaattaagaaagcagttccattcacaatatggaatcaaaaagaataaaatatttagggacaaatttaacaaaagaagtgcaaagcttacactctgaaaactacaaaactttgttgaaagaaattaagaagatctaaataaatggagagagacattacattttcaaaggctggaagacttggtattattaggatgacaattctccacaaattgatctaagactcaatgcaatccttattaaaacctcagttggatatttttgtagaaattgacaaactgatctaaagttcatatagaaatgcaaaatccacagaatagcaaaaacaatctggaaatgaaaaacaaagttggaggacttattcaccctgatttcaaagcttaatacaaaactcctatactcaagacagtgtggtgctgacataaggagagacatttagatcaatggaagagaattcagagtccagaaataaccctttacagtcattatcaattgcttttcaacaagggtacccaaacaatccaatgggggaaagaataatcttttcaacgaatgttgctgggacaattgtacagccacatgtaaaagtatgtgtggacccttccctcacaccatacacaaaattaaacttgaaatggatcatggactataatgtaagagctaaaactgtgaaactcttagaagaaagcatgagtaaatcagtgatcttaggtttcttgaagaatgatatcaaaaacacgagataaaataaaaaattgatcaattggactttattactccctctagtggatccaaaatataaccatatttataactatttcatcttttaaaaacaatagtaaaagatatttccataacaattcttctactcagtggtcattttcatggtcattatggtgaattacttttgctttcctgtatagcatggccaaggggcgtgaaggtattttcaggggtgatagaaatgatgtgtgtcttgaacgtggcggtagttacaccactgcaccaatttttatcaaaaccacttggcttgaagacttaaagtctgtgtacgtatttcaccatatgtaaattttacctcaataaaaatttcattttacaaagtgatcgctctgaggagcagaagacgagcttttcactgcaagcctttcagtacttcttaaaatttttaaaagcgtgtgtataaattactttaagctctttaagttttgaaaaataaaacatgttccaatttgaagcttcttattatccttgcttcatagaaaacagaagatgagaagaactctcttgtttgagagggtatcatttagcatcaataacaaggttttcctctcttccttccctggcgttcccccagagtcacagcaccagtccagggagaccacggggaggtccgggagcaggttctgagtcagaagaaggcttgcttttaaaagctgtgatggaaacgaagttgtaatcatttattccctgtcgtggagctactgtaccaaacacagaatctctaggaaatgaaagtcagaatctcaaaagcttcagtttttgaatgctaaagcttatttgcatatcaatattgcctcaggacaatacgcagaattagaaaattaaggaactacattagaagagagagaaagaaataggacaaatgcgtggaagtatagagctcccctctgtcatctagtaaaagtcataaataaaaagccacactcaactccatggctggtgaattttgataatactgttaccaaaattttatttacaaactcagtaacaaacaaatttttttcattaaaaaatacacatctgtacagcattactccctctagtggatctaaaaaaataaccatattgataagaatttcatccatcttttggggaacaatagtaaaagaaattttcataataatcatcatgctgatcagtgtttattttaatggttaatctgaattaatttttcttttctgtgtagtatactttttctttccatacactctcctgtaaaaaaaggtacttaacatttaccagaataattaattactcataaattagaaaatgacagacatttcaaacattacttacaaggataaaaattcaaaaactattgaaggtagtattatactcaacataaatcgtaaatattcaatgagtttcgcagtcactttaaagtaatgtgcaactgagagggtcattgtaatagtctattcacccacgaactgtttaaaattgggttagtgatcatttttaacccatttatgctggaggttgcaattttttgaatttttgcataagtgaaaaatcagaccttggcgctgaccttgagcagtaggatataaataactcccacaggcttggtgttccaatagtggaacactaggcataaaataataagtaatcattcaagtttcatgtctacttattttataaagtaaattttcgaatataatgcaagtattcattagatcctcaaatctcatttgttgcttagagggtttttgtgaacattttttcatgccatcactgtgtcttatatttgggagcagagaggtaacatataaataaaaagatgacacgtgtgtgttggcttaacttttgagtttgtcacaactcagtcacagatgttgctactagggaacagacacctaaaaaggggtaaaaaaaaaaataatgatgttcagttgagctgatctctgtagcctaatccaagtgaaattttaataattagacagcaatccctgctattagatgatctgggactggttttactatcgcaaataactgaatggagtttcacgtatctttttagaatgaagaatttgaaatgacaacaccaccttagaggtgtggggctcttgcagaagtgaatttaggtaaaagactgatgacaaggtttcgttttgtctgagaagtaacatttaacggcaggcaaagagatacatttcccaccaaaatcgaatgccactaccatctgcaaccccacagaggctcagctacctaaaatggaaatgaaaatataatgtatggaaatattctcttagaaaaactccttaaggcttcacatgtattaatgtattagtttgcaaacattaagatcaaagccaaagcaacaaatacatcctaaaaagtttttcgtcagatttttattaacgatatacaagtagcagggcataaaaaattaataggcccaagcgttgaaatgtcaaacccaatgatctcttccatgctcacctcttttgcttttttgtttcagtcttgctggcaccgggtcttcttgccttgagcaactctacacggttaagaaaaggagaaagaaaggttaacagatggtttaagagcccctcatctgttgcagtaagttaaaaaatagcaaaggaaggagaataggatccaaggtgtcaaaaacgcaaggcctaaattcatagacgtgtaatttcaagcctttgggcttacccaataaaccgttaaatattcagttttaaataaaatctactgtaggtttctttaaaaaaaaaaaccaatttgcttataatattgctaactcaagtttaaaatacagtttctcttcctttttaagtctttaaaatgctgtacattgtccttctaccctcattagcctctctatataattccatgcacccaaatcttttatttccaagaagcctaactaatctgatggagcagccaccacaaagcagagatagaaatgtggtactcactcctgtagtcccagcactttgggaggccgaggtgggcggatcacttgagcccaggagttcgagaccagcctggccaacatggtgaaaccccatctctactaaaaatacaaaaaaaattagccaggcatggtggcacatgcctgtaatctgagctactcggggggctgaggcaggagaatggcttgaacccgggaggcggaggttgcagtgagccatgatcgtaccactacactccagcctgggcgacagagcgagactccgtctccaaaaaaaaaaaaagaaaaaagaaaaaagaaatgtgcctaacacacacttctcacatatcccatggtgccaaacttttagaccccaaatcacttcgacaatgaaatcaaacctgaattgctaacagttatttgcacaacatctgtctcagatataagccagcaacacaaggccggacatcctccttccatgctgtttagcatgtgctgatataggaaaggcctaaagaactatgtgaatgctgggtgtggtggctcagcctataatcccagcactttgggaggccaaggcagctggatcacttgaggtctggagttcgagaccagcctgggcaacatggtgaaacccccatctctactaaaaatataaaaattagccaggcatgatggtgcatgcctatagtcccagctactcaggaggctgaggcagaagaatcacttgaatccgggaggcagagatcacaccactgcactccagcctgggtgacagagcaagactccatctcaaaataaataaataaattttgacttgaaattccaaaagaaaaattttgcctgtttctaatctatattgattagcaatatattgtaaacagaacaaatgaagaatgaccatactaaagctgaaacactctgcttaaagagagaacaatggcagacaccatcatcagagggacctggaagaggacactgaccccagcagggagttgtgatggaagaggagacagcttcactgtgtacagaagaataagcttcctactactggactgggggtggctcccatccccgggaccagtgtctgtctccagtcctgagcgagtcaaggtagagacactgagtatgcctaggattggatggtctgaataattccagctgtttctgggctataggaaagatctctggttgtcctgtacctggccctggggtgacttagtacatggggaatattggcttggtgtgtgagaatttgataaaggagatggttgtgggttgggctctggattggttggtttgtatgttaaaggcatgcttgcaggggagtccttggctatctctaggaattatctctagtgctggaaggggcagtctctccaggatcaaggcccgcaaatgcttgagcatgaagaatctagaaaatgagaaaacagagtcaatacagagtagaaatggtaagtctatctaactcttgagaaattttgccataaaggggagcagggaaacgtggttatagacggggcagacatgatacaagaagtgcttttttttttttgagatggagtctcaccctgtcatccaggctggagtgcagtggcatgatctcagctcactgccacctctacctcccaggttcaagcaattctcctgccttggcctcccgagtagctggaattacaggcatgcaccaccactccccactaatgtttgtatttttaatagagacaaggtttctccatgttggccaggctgatctcaaactcctgatcttaagtgatccgcccacctcgtcctctcaaagtgctgggattataggtgtgaaccactgcccctgccaagaagtgcttttaataagagagagagtataacatgcttttatgctgctgggaagcaaggagttgagagaaaaagcaatgagtgggagaatgaagagatgagccactgagcgggaggagagatggggcgcagtgtgtgagtaggggctgcttacagccccaggagagccagggtgggaacagaggcggggaggctggtgtttttgatttcatggctggatgatgagacagttctcattttactgcttcttgtttctcagtgaaacagacaaggtcatctactgaaacatgaggaagggaaagggtgttgatgattgaaggagaaggcatgaaacaccagttttggagagtggcagagtgagccaactggagagatggatttgtgttgctgagccgtgctacaggcccacttgtggtttgtggtccttaagttaaagttgggctaagttaggatggtattggttgagggagttctgagtatttattctaagaagagggtatagctccgagtattctaaaaagagagtgtaactatctacacacatatagatagttgtatttctggctacctaaagaggaccggaatgatttagctcaaatgagaaaagaaattgtctccgtgaagtgaagttatgggtagtctttcttaacctctttccatgtttcagaattttcataagatgttccaaacagtatgtatttcaatatataaacagatgaaaacaataaagctatttcagaaatcggggaaaaaaattaaaaacccaacaaaatgaggttttgctgggaaagaaagcagctaacctaatttcctgtagaaaaactgctatcctaaatgtgaatgctttcttgactattaatttggatataattataaccctctacaacaggagaaagactaatgaatcacaggggaaaaaatgaaggaaaagcacaatactgcaaaaacataccaaagacaaaactgcaaagctactgaaaacataaaaggatgtcttaacaggatactcatgtcctcttgggagacttccaggtgaaatgattgaagatgattttccagccgttcctggaaggtggggtaaagaaagaggaaaaatttcctggcacgtcagtctatgaaataatataatgcaatatgaggggaatcttggacgggctgatacgaagtcagaaacccatgcaagggttgcaatctgtttcctgtttctctgcagtcctactctgttctgtgatggctgggacagatggggccccacagccccttccttgtcacatggcagactgagcaaaggggactgatttgggagggaatggggcgcctccagctttctgggcactgcaggccagcgggttatggaaggtcccgcttgccctgggcagccatgccagctggtggctggtgctttggaaaggtcctcactgtcagccacagttgcttaatctaaaaacccaatcttctgaaagtgtcagtgctgttggagctcaacgtctgtaagcttggccaaatatgtcaagaaggaccgacctgtgggcttagggggaaaaaagcaaatgaatgccaagtttacacagataggccacattttagtttacttttactaaatcttagcctttcattttgttggaagacatggagaaggcacacgatggaaagacccttcacctcctcccactttaaattttagggatgataaattaccgtgaaattaatttagttttgctattacacttttaccgtgagtcccgagccaaggacatttttatgttaaagtctttgtagatgtcatgtttttgtatgcctgaaatacctctgtgtataatattgatattggaaaaaaatctattaatattttgtaaaatgatatgtctggtatggcatttgacttcttctgggggaaaagaacataattgtgcaaaatgttagaaattctactatcgagactgcacaagtatgacagatacactaattccagtaagtataggtagagatcttcatgaatggggaactacatttgaaaagatcatttctgatataattggaaatcggggggattcttaagactctccaaaaaaacccacttttcctgagtactttgctttttaggcagaaaaagaattaactcctaaagccatcccactggcacaaagagagtcaggggttctctctggaattttgttataatagggctcagcacattctagcgtgattgttagtttcagacacttgccacctgtgtgcagttggtgaaagtaagaggaatgctactttgcctgacctcgtttaagaacaagaacaaacattcttttagagtttaaaactcaggactcatgctttaatctttcaaactcccatcttcccagggcgccctcagctttcatcagtgcttttctcatagtcatgcctcttatagttttataattttttaaaaggcaatactagatgagtttaaggcgctggtatccattttccattaaataaagtgtcaaaacttctgatactatactgtagagtcaccaccatgccaacagttttaatttcaaacacattttccccattctgatgatattagaacttcacccatggcactactaccttataacttttatttttaattaaagaagttaaattggcaacagaaaacactttgctttcacattagctttgttaataaaaagtgaacgtttaaagcagtgtacctgtggatgaaatcaagttccaagctccagtttcccctttatctcatgaaggcatcaagctaaaggtctatgcttatgacaatcttaaaacaaaaggaacaaggaaagatgaaaatatttaaaacccaactattttcagctgatggcaagtcaaaaaactacacgagatattttaatacagcaaagattccatccttctagatgctttgcaaaatgatattagataactaatcatgagaggcagcgaaaacctcaaagcaagtgaaataaaaataattataattaaagactgggtgtagcagctcacgtctgtattcccagcattttgggaggctgaggcaggcacattacttcaggtcaggagtttgagaccagcctggccaatatggtaaaaccctgtctctactaaaaatacaaaaattatccagatgtggtggcaggcgcctgcagtcccagctactcaggaggttgaggcaccaaaatcgcttgaacccgggaggcagaggttgtagtgagccgagaccgtgccactacacttcagtctgtgtgacagagcaagactctgtctcaaaataataataataataattattattattattaaagggaaacatggtagatattgatacataagaaggaaaacctacaattatcatataattaaagaagtaacattgaggcaatatagaacaatatacagaggtaaagcgtttccactatcatagtagaaacaaattaaaatacttttgatttggttaacataaagggaggaaaacaatctggatgtcttttttaccagtttattattattaaagcatgaatacttggggtttatgtaaactggtaaagaagatattcagattctctctatatatgtctaaagatatatatatgtataatatattacatatattcattatatattatcttacatttctatcacttacatattatgtaaatattcattcattctaaaattggaaaaatgctctatttctaatcaggctggaaaaacaaaataccagatttcaaattattcctctaaacttcttccacttttaaaaatagatacccttgtttattaaaaaaaacaaacaaaaagccttaaagcttgaagtgatactaaaaactcaaccatcataataaccaagaaaaatagtcaaaattatcttaagacacaattttattagacttcgtgaaggaaaactggaggagtgaccatgtggtcacctcccctctctctctccctcttaaaaccatgctaaaattgtaaggaactctaaacaaacgtgtaatttcatgaagatgaagagaactgaaaagaaatacatacacatgtagatagatgtgtcaagtgtgggccggatgtggtggttcatgcctgtaatcccagtgctttcgaggccaaggacctcttgagtcccagcgtttaagaccagcctgggcaactaacaagaccccatctctttagaaattagttgggtggggtggcatgtgcctgtagtcccagctactcaggaggctgaggctggaggatggaaacatggtagaagtagatgcagaaggaaaatctacaattaggctgaactacaattagggtgagcctcccaggcttgagcccaggagttggagactgcaatgaactatgatcacaccactgtactctagcctgggtgacagaggaagatcctatctttaaaaaaaaaaaaaaaagagagagagagagaaagaaaaaaaagtggatgaaggagttccagttctactgctgagatggagaaagaacactctagcctatctctcccactgaacggagctataaaacatacacagcatgcatggattagttctttgaggattccaaagggaacatgataaattaaagaaaaataacataatttgaagtatcaccaaaccttttttttttcccctccagtatcccccagcctggatgagacacagctggagcctggaatggacatggagcagacagagagcttcaggacacacccgctcattctggcttgaggagcaggaaaggcatctgccaacactccgagttaagtagaaatattacccacaccccatcatcaaatttttgtcattcattccctcacacctcagcccagagctacccacaggtgcctaaaattctgagggagaggaaatttcctctctaatcaggggatgtcccccaacaggaagggacaaatcttgtgtctacttgctcttccttccttctctccttctgtcttcccctctgtctctctttctctctcctctcccaactcttggccatgggaagtgcatggcagagcatgataaataaagcctccgctttctgacctgagaactgaaaatggagcacccagagaacataaaagtacctgagagatggtgaagaaatacgagttggagaagaccaccccataaagtcatttatgaactcctgggcaagcttccgagctgcacatgcatggatctaatcccaaaccactcaccatagacgtcgtgaactgaacaacagaataaagcatagcccagatcccagactgaccattggtggagcacatctgggacagatctgatagcactgcaaagactttgaaaatccaattcacattgacctacaacctttacatctggttagaacatgcagcctgaatccaactaggtaggtagaggtttgatatttaaaaataactataacgtaaagggcgggggcaaggaaagtaatagtaggacctatgtggtggttagttttcttctacattgcttctggcatagtaaaatattgattctaaatagacagaaaagttaagcatgtttattgttatccctggagcaatgaaaccatactaagaaatagatatcaaaaacaaaatagatacattaaaatggaatatttaaaacctttagatattacaccaatatttgtagcaattttatttttaatagccaaaaactggaatcagcctagatgttcttaaataggtgaatggatatcttagtccattttgtactactattacggaagacttgagatcaggtaatttataacaaacagaaatgtttctcacaattctggagactgagaagtccaagatcaaggggccagcatctggcgatctggtgaaggcctttttgctgcatcatctcatggccgaagggcaaagagagagagagaaagagaggaagagggagcaaaacttgtacttttatgagaaacccactccctcgataaaagcattaatgcattcatgagggtggtgtccccatgactgaaacatctttcattaggcctcacctcccaacaacaccacattggagatcgagtttccaacatgtgaactttgggggacacgtttaaaccagttcaaggggtaagcaatctgtggtccatatataccataaaatattacccagcaataaaaagaaacaaactactgatacacacaacttaaatgaatcttgagaaattatgctgagtgcaaaaagcctatcccaaaagattacaaaatatattatttcacttatataacatttttgtttgtttcgtttttcatttatttatttctttacttattttagagacagggtttcactctgtcacccaggctaaagtgcagtggcatgatcatagctcactgcaaccttgtactcctgggctcaagtgatcctccagcctcagcctcccaagtagttgagactagaggtgcacaccatcatgcctagtagagacatggtctctctatgttgcccaggctggtcttgaactcctggcctcaagggatgctcttgccttggcctcctaaaatgctgagattacaggtgtaagctaccatacctggccaacatttttgaaatgagaaaattttaggaaaggaatgaaagattaatggttgccagcagttcagaatggggaagccagaagaaggttggtatggttttaaaaagaaaacacaagagcttctcaggttctttgtagtattggaactgttcagaatcttgagagggtgatgggaacacaaacatatacaggtgattaaattgtatagaactgaatgcacacaaataaacacaagtaaaactgggaaaatctgaataagattagtggattgtaccaatgttgaattcctggctgtgatgttatattatagttttccaaactgttatcactgaggaaaactgagaaaactgtacaagagatgtctttgaattatttgttacatcttcatgtgaaactataatttaataaaatgttcaaataaaaaatttacaaatgtttcaaaagcccaaaagaaagcaggaataggtaaacagaggaaataaaaacagagggaatgaaccgaaaaaaaattaaatggtgggccagttaacatatatttataattgattaaatgtaaacagtttagatacaccaattaaaagacagatatcgcagaatagataagagtggtctaactatatgctgtttacaagaaacttactttaaatataatagcataggtaaaagtaaaaggatggaaaacaatataccatggtaatactacaaaagaaagctcaagtaactatatcaaaattagacaaagtagatattaggccaaaaagttggtccaaaaaacagaaaggcattacttttttttttttttttttgaaacaatttctctgtgtcacctaggctggagtgcagtggtccaatcttggctcactgcaacacctgcccagaaagacattacttaatgattaaaggatcaatttaccaagaaaatatagcgatccaaaatatgtatggaactaacaatagagcttcaaaatacatgaagcaaaaaccgaactattggaaatttaaaatataatgattaaaataaaaaattcaatctgtcccaaaatctggaagttcaaatcaaagaagtttgatatacttacagaaaaatgaaggaagggaggaaagaaattaaaagaaagaaaataggagagaaattttaaaagaattagatcaactagggttggaaactatcaaaaaaacaatgcaagaacaaattccaaaactaaagacaatgatgagttgccaagccaaaatgtctccctgagaaaccagcacaattaatgaaacaatacttactccaaggttcatctctataaaatttcagaactccaaggattaaaagaaaattctaagaaaaacaggtcacatagacagaaaaagccaaatggtattggacttcttaatagcaccattggcttccattattgctattgagaagtcagctgtccgtctaaattctgttgtttttatgcaatctgcctttactccctggatatttttaaggttttacagatctcttcatattgaattatctgttatttcatcatgaaggatctcaagtggagttttattttgttttgtcctgttctctatcctacttgggattcattatgattcctgaatgtgaagtttcattttttttcatgagttctagaaaattctagtatatagctctgccatttttcttttggatactgcttctttttcattctatttattctctttttctagaattccaatgaaatgtatattaggcattcttaccctatcctttatgtcttttagcctgtgcttcatatttcctatctccttgtttctctatactggattctggatagctgagctctgctttcctgtttgctagttctctcttcagctatgtctaatccgctgtttaaccataaggttcttatttcaatgtgttttttttttcatttttagaagttctatttgaatatttttcaaaactacctgattttttttcttagtttacaattctgttttctttttttatttctttcaacatgaaagcacatttattttatattctatgtcttaaaatttatagtatctgaagtctttagggaactaatttctactctttgttgtttctgctaattttcatttgcaatggcatgtttgcttgtgtttttcttgatttttcaatatcagcttatgttcatcaggacttttctgtggggatttcatgaggcctggcttgggagtgcattcctccagagaagatctgcatttgcttcttttaggtacctgaagatattcccaatccaggaccactttacattaatttcttggcttgagggttatgtactgtgccagtgccataaattagaatgtcacaccttatgaaggctggtctgaattctaaattatcaggggaagtttctttttctaattctgcccagggtccaagctgaaaaaaccacatttccttactggatcatctcttttaactgcacagatgtgtctctagatcaacactgttcaaacctttcaactttcacaggccaaggcccttgcaccccgcaggtaaaactcaagactccaggtggtgggaaattaccaggcaaccttagatagccactttgtgacaaaaaggttttgggatatctagtctatcatattgtcagaaatggaaataaccaatccttcttttcacttcctctagattttgagtgtagaactgctgagtgaatctaagtgagacaaaatccttttcccacacaggaaaatacaatttggtgtttggaaaaaggaaattgggccaccatctttttcttagattagaggaatctaattaaactactatctcttgtaatcaagaaacatttacctgaagttcaacaatttctaccatttcattttgttatattttgaacattacattcaagcaaaattacataatgtttaataaactttattttctagaacagttctacattcatagcaaaattgagaggaaggtacagagatttcctatataccctctacccccacacacacacagcctcctctattgtcaacatctcctaccagtgtggtacatttgctataactgacgaacccacattgaaacagtattgttgcctggagtccatagtttacattagggttcattgttgatcttgtacattctataaatttgggcaaatgtgtaatgacatacatccacaattgtagtattatactaaatagttccattgccctaaaaatcctctgtgctctgcctattcatctttctgtccttactaacccctggaaaccactgacttgtttactgtctccatagttttgcccttttcaaaatgtcatgtagttggaatcatgtagtatgtagccttttcagattggcttattttacttagtaatatgcatttaagcttcctccaggtctattcatggcttggtagctcatttctttttagtgctgaataatattccattctctggatgtgccaatctataaagactgaaagaggtgcctacttcttcaaatgcacagacaccaacacaaggccacaaggagcatgagtaatcagggaaacataacaccaccaaaggaacaacataaagcaccagtaaccaatcctttaaaaatggagatctatgaactgcctgataaacaattcaaaataatcacttaaagaaactcagtaagctgcagataatacagatagataactaaacgaaatcagaaaaacagacttagaagcttaacaaatagaatagaagccatagaaaagaaccagtaagaaattctgggcctaaagaacacatgactgaactgaaaaatttcatatagagtttcaacagcagacttggtcaagtagaagaatatatgcaaatcaataaatgtaatatacacattaacagaataaaggatgaaatcacatgattatctcaaaagatgcagaaaaagcatctggcaaaattcaacatcacttcataattaaaaactcttaacagattaggtgaagaaggaatatacctcaacatgataaaagccatatgtgccaagcccacagctaacaacatactcgatggcgaaaagctaaaaggttttcttctaagatctggaataagacaatgatgccaattcaatttaataaaggcattcaaataagaaaggaagaagaaaaactggctctgtttgaagaggttgcatacagaaaattctaaagactccaccaaaacatgtttagggctaataaatgaattcagtgaggttgtgggatacaaaataaacacagaacaatcagtagtatttatatacactaacatcaaactatccaaaaagaaatcaagaaatgatcccatttataatagcaataaaaacataagattctttttttttttttttttttttgagatggagtcttgctctgtcgtccaggctggagtacagtggcacaatctcggctcaccaaaacctctgcctcccgagttcaagcaattctcctgcctcagcctcctgagtagctgggattacaggcatgagccaccatgcccagctaatttttatatttttagtagagacggggtttcaccatgttggccaggctggtgtcaaactcctgacctcaggtgatccactgccgcagtctcccaaagtgctaggattacaagcgtgagccactgtgcccggccaaaaaacataagattcttaagaataagtttaaccagggaggtgaaacatctgtacactgaaaatgataaaacattgattaaagaaattgaagaggaaacaagcaagtgaaaagatatcctatgttcaataattggaacaattaatattgttacaatgtccataataccaaagctgtctacagattcagtgcaattcctatcaaaattccactggcaattttcaaagagaaaaaaatattaaaattcatatagaactgcaaaagaccccaaatagacaaagcaatcttgaggtaaaaagaacagagctagagcaagaacactacctgacttcaaaatatactacaaagctacagtaattaaaacagcatggtagtggcataaaaacagacacacagacacagaggaacagaatagagagcccagaagtaaacttacacatttatggtcaatggatttttgacaaagataccaagaacacataatggagaaagggcagtctcttcaacaaatggtgctagaaaactgaatatctacatgcagaagaataaaactgaaccctcatctcacacaattacaaaaatcaactcaaaatggactaaagatttaaacatagacctgaaactgtaacactactagaagaaacatagggagaaatatccttgacgttggtgtgggcaatgatttcctggatatgatccccaaaacaaaggcaacaaaagcaaaaaatagacaaacaagatgacatcaaactaaacacttctgcacagaagaggaaatagtcaaagagtgaagcaacatcctacaaatgaggagaaaatatttgcaaaccacacatctgataaggagttgatatccacgctatataaggaactcaaataactcaaaagcaataaaacaaataacctgattaaaaaatgggcaaaggatctgaatagatatttctcagaagaagacatacaatggccaacaagtgtatgaaaaatgctcaacacaactaatcgtcagggaagtgcaaattaaaagcacaacgagatatcaccttaacatctgctagaatggctgctatcaaaagacaaaagataatgagtgttggtgaggacgtggagaaaggaaactcttgcacactgttggtaggaatgtaaattagtacagacatgacggaaaacaggatggacagtcctcaaaaacttaaaataagagttgttgtatgatccagctatcctactactgggtatatatccaaaggaaatgaaatccgtatgtcaaagagatatcacacactgccatgtttactgcagcattattcacaaaagccgagatatggaatcaatctaagtgtccctcaaaagataaatggataaagaaaatgcgggtgtgtgtgtgtgtgtgtgtgtgtgtatacatacaatgaaattctattcagcctttaaaaggaaaaaaatcatgccatttgcaacattgtggataacctggaggacattatgccaagtgaaataagccaggcacagaaaggcaaacactacatgatcccacttatacatgtggaactcataaaagcagaggatagaatggtggttcccggggtggggtggggcagggggatgaggacatgtcagtcaaagagtacaaagtttcagctagacaggacgaataacccctggagagttaatgcaaaaatggtgactatagttaacagtaatggattgtatacttgaaaatcattaagagcatagatcttcaatgttttcaccacaaaaaaaattgcatgataactaagtgaagaatgaatatgttaattagctaattgtgttaatcatttctcaatgtgtgtatatatacttatttatatatagcaaaatatcatgttgtatactgtaaatatatacaatttttatttatcaattatacctcaacaagctggaagaaacaaatgaagttaattctcttaaaaaataacatctcctcttgccaggcatggtagttcacacctgcaatcctagcattttgggagtccaaggcaggaggatcgcttgagaccaggagttcgagaccagcctgggcaacatggcaaaaccctgtctctacaaaaaatacaaaaattagccaggtatggtgttgcactcctgttgtcctagctactcaggaggttgaggtgggaggattgcctgagcccaggagacagaggatgcaatgagccgagatcgcaccactgcattccagcctgggcgatagagcaagacgctctctcaaaaaaaaaaaaatcctcttaaaaagatagttttatgtatctacctatgtatgtatgtatgtacctatgtatttaccttcactttcttcctaaacctcactaaaattatagtaaagttattttctcaaaaaaataaagaaatatcaccataaacctcaagaagagaaaaaaataacaacacatttttagaaactggaaagcaaatgaagaatgactttgcagatacaagaatccaaatcttgacccgagaacttacctaatgtacaccacactgccctccaaatccttccatctgtgcaaatcccattcatgaaggcttccttcttttcaacattagcaagattccagcccgccctcaattcattttaaaatcctgcctctatgaccccaataataataacaaacctttacctatagaacatttgcaaagttcccccatgtaatgacaagactttttaaaaaacaaaaaaacacaaaaacaggatctcactgtgttgcccaggctggagtgcagtggcatgatctcagctgactgcaacctctgcctcctgggctcaagcgatcctcccatgtcagtttcctgagtagctaggactacaggtgcatgccaccatgcccagttatttttttttttttttaagagacagggttttgccattttggccaagctggtcttgaactcctgggctcaagtgatcctccctccttggccaccaaaagtgctgggattacaggtgtgagccaccatgcctagccatcaatccttattttaatggattggctttagcatttgatggttctcagacaagatcaggcgcattcagggtggtatggccatagactatttgatggttctcaaattgtttcttattgttcaatattatttctccagtttgagtgtaaatgtcttaagaaatgaatttccattttatccagcactaaactttttcacagcaacagactacaaagaggtaatcagtaagtacccgcagttcctagaagatgcacctactgataatcattacagccaactaactagtgtccaattagcagtcaaaaataacagtagcaagtctctgtagccatttttaagccttgcctccaaaaaatatgccatttgtcctgtatgacagcaggtggcatatcagagacccatctttccacgtactgcagggtgacctgcctggtttagcatttagcaatcagacttttttatagcaataaaccccatgctgagtaggcaacagatgaaaaaaaaaaaaagatgccttttatggcacttcatgataatggctttattgccaaaagccgtattagcagaagatgaaagattcaatttataatctcctgaatgtctggatgttcagcctgtttctgcccaagaagagatcagtgcccgtggaagatgtatttgaaggacaatccacagtctattccgctctgccgagaaagagtccacattcttttccctttcaagccaaaaggaggcaaaaacaaccaaatgaatgagttcatgccgctctgaacttcagcgccagagtgaagcgttgagatttagggccacccgactccttgtgacgatctaaaagtcgcttagaacaattcacagcaatgtcagaaaaaacttcctgctttttgagacaacaaaaccagatggaaaactgctaaaatggctcaagtatgtggcacttttataatgtttatgtggctcttgtaaaaaagcagctttaattgacttttttgcttcccatgtcctagttctgtcaaaatctcttctggttttggggggggacttaaatgagagaacacaccattcagaatatactgttaattactataattcagaaacaatgtcctccttctctggtccttgccaaaaagccaagggagaaaggcagcagaagggaaaatttaaaataaagcacatttctaaagacggcattgaaaacaaagcaaacagtggaattgcactggcaagaaatttcactgggccgggcacggtggctcatgcctgtaatcccagcactttgtgaggccaaggcaggcagattggcttgaatccaggagttcaagaccagcctgggcaacatggtgagacctagtctctataaaaaatacaaaaaatttagccaggtatggtggctcatgcctgtggtcccagctactcaagaggctgaggtgggaagatggcttaatccagggagttcaaggctgcagtgagctgagattgtggcactgcactccagcctgggcaacagagcaagacctcatctcaaaaaaaaaaaaaaggaaaagaaagaaagaaaatttcactgggagcacccacccctttgtgtgacctacagaataccactaaatatctctgtttcatatcatcttcatataaataaggaagttaatacacttctacctcaaataccaaatatcagtgctgaaggagaacttgataccttatttacttaccttattctctacatgaagtatctcaaaaggtgttttgcaaataagtgctattcttctcatccttagaaggtataggtaatggatttaaaaaacacacaaagagataaaaactctttcactttctttatgaacaaatttgacctagggttaactttttaatcctgttcccctggaaacctgataaaggtggaatgtcggctgtgtcaccaggctgtccttagatgacagaaggaggtaaagagatgagcccatggaagactgagtaagtagtgctaagtatggctgatatggggccatgggtctggctagacctcagaaaacccccaagatggaagcttaatagaacaaaatcagtatatagatttaaattatgggtgtattttagtcatttaatcattactgttttctcttttttcaccttttttatttaaaaaaaattatttaaaagtcaccaccaccaaagtcaagaaacaaataagacaggcatggtggctcccatctataatcccagcactttgggaggccgagcggggaggatcgcttgagcccaggaatttgacaccagcctgggcaatatggtgaaaccacgtctctacaaaaaaaatacaaacattacccagtggctgtagtcccagctacccaggaggctgaggtgggagaatcacttgagcccaggaagtcgaggctgcagtgagccaagattgcaccactgcactccagcctgggcaatggagtgagactctgttaaaaaaaaaaaaaaaaaaaaaagatagaaagaagaaaaaaagaaagaaagaaagaaagagagagagagagagagaaagaaagagttaaaccagcccaccccaaaatccctccatgttccttatcccaatgtcaacccctcccactccactaaaggaatgaaagaaatgaccatcctggctttttgtaatgatcacttcctcgcttttttgagggagaagggggtgattttatccttaggtatgcaccctagacactatagtcttgccattttttaaaatgttgatgtgtattttaggtgtctcctcattttgcagaatccctccatccctttgtttttactgtaatttatctgttgaaaaccctggggcctttgactcgtagtttttcacagtatggctttgctgattgatactgttggtataattcaacatattcctctgtatttcttgcaaattggcagctggttctagaggttggatcagactcaggttcagtccctttagaaataccataggtggtggtgagttctttcattaggaaacaaataaaatccgacgatttttctttttgtgacgtgagcagctgttaatgcacaatgcctaaatccattaaaatgtgatattctaattctgccatttcttttttattcattagttagaatatttttataattaaatacactccctcttctacctctggttgctattggaccagatcacctaggaaagacaggatgaatgcttgaatctttccctttatttactaattttaagatcatggaggctcacacctgtaatcccagaactttgggaggccaaggtgggcagatcacttgagcccaggagtagaggaccagcctaagcaacatggtgaaaccccgtctctacaaaaaatactaaagttagccaggtgtggtggtacacgcacatagtcccggctactcgggaggctgaggtgggagaatcccttgagcccatgaggcgaaggctgcaatgagctgagatcgcaccactgcacttcagcctgggtgacagagtgagaccccgcctcaaaaaaaagatcatgtattggattcctgttgtcctccgaaggagagtaatccggttttattttaaaatcataataatctgtgaatttaaacatattttgatgttttgatatattataaatatttctcttattttagctcacatggtcccaaatttggcaatagagatctttttcaaattaactcctgagtccttttgacatgatcttaaattctctgctaacttcctcactatttactataataaaatgttcctgttttattttgtgcatctgctttctttctttctttctttctttctttctttctttcttttctttctttcttctttctttctttctttcattttttgtttttgtttttgctttttttttagacaggatctcactttgtcatccaggctggagtgcagtggtgttatcatagctcactgcagcctcgacccactgggctcaagacatcctcccacctcagcctcagatcttctttgcctatctgcaaaacatttgtaacttcttctagaatttcatctctttcctcctttattttccacatttttctcctttcaactattttaaagacattatctgttgttctatttgcatgtatattcctcctaatttagtctttatttctgatttttttttcttctgtttttaggggtttttctcagttccataagctttcctgctggtctaattctgacttatgttgttcttgcatgtcttatagtagctgggactatatagtcctgagtagctgggactacaaggcacatgccatcactcctggctaatcttcttttttttgttttttctgtagagatggggtctctctgtgttgcccaggctggtctcaaactcctgggctcaagggatcctcctgccccagcctcccaaagtgctgggatcacaggtgtgagccaccctgaccggccccattttggacattttctaccccagatctggaatcagccatttatccaagagctctgatttcttttagtgggaaatggtattttaaaactaaaatctgggcacgagagatgcgcattgctaggtcttttcattagtcagaacaagaaatatacatacacatacatacacataatattttttaaataaaatacctcgagttatattgataacttctcatttaaatcaaagttttttaacatctcttctgaattacatctatgtttcttttctgccatactgggaaccccagttctttaaaacacaaaagataatatagttggaatatctcataattttctgggatgcaacagtttaatggtattaatacagccacctccaaccttaagggggtgctaacctgggaagaactggtgttatcaccgacagaaagaggcaccctggatgttttgacgtggttcacgtgaaagatgccaacagcaacagctttgccacccagctttccaacctttttgttattggcaagggcagcaaaccatggatttctcttccccgaggaaagggtgtccgccattcaacccattgctaaagggagagacgagactgtggccagagcagtgggtgaaatggtctctgggtgacatgttagatctttgtacataattaaaaataacatggcatgattaattttttaaaaggctttaactgaaaacagttaaaaatgtttttgcatatgactgctcctgtctccccctatttttttaaagctgtgctaaatttacagtgtcagaacatatagccaacatacagccattacaagccatactctttcttttttcctctcatttagtccaaggtctataagtaacttattctgttgtctatctagtcttttgggttgtctgaagattttttttcttgtagattcctcaagaaaggttcatggaagcactattttctgagttcctgcagattgataatagtaatctttatacttaaaaatcagttttcctggatatgacatctttgcctctcattttatttccttgagtatcttaaacatatttctccatttttttctggcataaaatattgctgtgaaaaaaatctgaaaataatttaattgactttctcttctaagtcacttgctcatcttgctgcaataagcaaatgatttttttttctttctagttcaattatttgactagaatatgtctaagtgttgatcattttgagttatccattccaggatcgatattctcaagtacatggtgagctctttcttttttttttcattaatcattccatgttatttttaattacatgcaaagatctagcatgttacccagagaccacttcaccattgctctgttttacccactgtttcacccaccatttcacccaccaccagtctcttgtctctcccttcagcaatggtgaggcggataccctttcctcggggaagagaaatccatggtttgttgcacttgccagtaacaaaaatgttggaaagccaaggggcaaatctgttgccattggcatctttcacatgaaccacatcaaaagatccacggtgcttctttctgttggtgatcacaccaattcttcccaggttagtatctccaatcaccatacacaggttaccagtgtcaaacttgatgaaatcagtgatcttgccagtctaaacagtgtcattcaccttgacgaaggagtcaaggtagtggatggtgtgagcatcgtggaaccaggtgagggattccttttgtgcccacaaagatttttcttactttgcacaacttgtacttggcctcctccagtgtaatacaatgtacagcaaagcgaccattgatgccacagatgagacagaaattctctcccgtcttgtgaatgctgatgacatccgtgaatccagcagggtaggttatatcaatttggaccttgccatccatcttaatgaacggctgcatgcaaatctttactttgtctcctatgagggcatacttaagtctgttccttaggaaaatattaggagagacactctctcagcttgtggggactggtggttggacaaggagcaaacacactagtcaattcatccagcatccaatgctgtggagctgctacccgcttcagatgcttcctaagaccacgagccacgactgtattaggcacggaaagagcatggtgagctctttcaacatgcaattccaaatatttttcacttcaggaaacttttctgaaagtatagttttcagtgtttgttttctatccttgccttggttttcttcttcagggactcttattacgtaggtgttggatcttctttgcctatctgcaaaacatttgcaacttcttccagaatttcatctctttcctcctttatttttcacatttttctcctttcaactattttaaagacattatctgttgttctatttgcatgtatattcctcctagtttagtctttatttctgaattttttttcttctatttttaggggtttttctcagttccataacctttcctgctggtctaattctgacttatgttgttcttgcatgtcttatataattttctcagtgtcttttaccttcttttgaatgagaagattacagtgttgatttggtttgtgagcttgtctttctacatattttctctgtctgaaaaagtgttattctgctctttaatctctttttaaaaataataacttggtataggatttgacctcaattgcttgctcatttttatgtaaaattaattttcctgaaattttagaagaaggagtgcctccaggtagcttttcttatttcacagaacccccgcttcacttatgctgtctcctccaaaatttggaggtttgctttttgagatgtgctggctctgtgcccctccagctttttcatctggaccttctccttccttcatctttattggccctgctctgctcaattcaatttctattcccagcagttgcttctcagtgtgggagcctatcctgaaaggtacaatttcagagcatccatgggagtctcctccaggcccttgagaccttaccccaggcagcctgtgctcgtccatgataagagaggacaaaacccctcccgatttcagtgactgttcccagattggtctgctgcactttccagttaacacctgtttgctctttgaggatgctcctattctctagtctgtcaaataccccattagttccctctgcattcttccacatagacactgatactctaaaggtcttgtggctgttgttggtttgtctttgccatttttgttttgaggtttctgggaataccttgtaattagttttgttgtaaatgtcatccatgtgtttttggttggccactagtgctctattttgtttacaaatttgtaaaaggtagaaagctctgccaccatcttcccagaattccttatttttatttttaatttaatatgatcatgcaaacgctaataagaacaccagataacaggatggacacttagcattgtgttacaattgcttacagtattcagtgcagtaacagcctgtacagatttgtagcctaggagaatagactaaaccatatagcctaggtatgtagtaggctgtaccacctaggttagtgtaagtatgctctatgatgttcacccaatgacaaaatttatggtaccataaatttatgcatttatggtgtcaacacaagaagttggagtgaacctaaaatccccaggtattataataggtatctaaaaactgttctgacaatcttataaaaaactcaatgtgtgttttttcatgcatttaatttctagatttgcttcagtgtccctgtgagaggctcacatttatctttcctttatgccttaactccattgcctgtgtaatgaggataatatttttaatattagaaagatacaatttttattcccttgtagtcatattccaccaaataggtaaagctgtgattcagagtaccaggcaaggaatcagtcacagccaagaacagatggatccctattcagctttccatctcaaaactggctttttgggaggccacgacaagaccaatgccctgaaggctgagttttcttgaaaaagaaaggcccctcccatctccaaacccaaagttcctctataaatatttataatccaagctgggaggacttaccctagagaagactacttcttgcgacagagaagactcaacctgtgacacaagggacatttccactggataagaaagaaagaattcttggcactagggatataagagaaattcagaagggacccatcttgatccaggttcacatgaatgcacggcctgtggcaggtgttcatctatgatcacagctggcagatgtgcaggcaggttggccaccagctcagatgcatgtggctcaatcctatgggaccacccaaggagcttgatgatatgtggaaccacatcaccaccaccacagggaagaaaggggtggcgtttacccatcagcctccatgagttaagggtttccctaggggtattacctcccctacatttccaggttgcacatgtgtgagtgctgaatggggacacatgggaatcccatgtcccagcatcagaggttccaaggcaggaatcaggaggctgcagggaggtactgacaggtttcacctgtgcagtactggtcactgctgcagcaatgtctaaaagaagagttgagtacacaggcagtgcccaatataggacccagtgaagttcttataatagagaaagcaaatattttaatcagatgttctacctttcattacaatgtgattgtgacggtcaatattgagagtcaacttgattggattgaaagatgcaaagtattgttcctgggtgtgtctatgagggtgttgccaaaggagatgaacatttttgtcagtggactgggaaaggcagacacaccccctatctgggtgggcacaatctaatcagctgccagcatggccagaataaaaagcaggtggaagaacatggaaagactaaactggctgagtcttctggcctccatctttctcccatgctggatgcttcctgccctcaagcatcagactccaagtccttcagcttctagtctcttggaccatcgaccacagattgaaggctgcactgtcggcttccctactttcgaggttttgggacttggactggcttccttactcctcagttggcagatggcctattgtgggacctcattttgtgatcatgtgagtcaatactctttaataaactccccattatatacacatctatcctattagttctgtccctctagagaaccctgactaatacagtgattaatcactttctgcaagaagtgaaggtatgtacagagtctgacactagattttcattcattacacatgcaacaaagaacacataaagtcctatagactttataaatttcctttataaattatccagtctcaggtatgcctttaacagcagcgtgaaaaaggactaatacagttatcttttggtaactgcacatttaaggtgttaatttcatccttcaattgacagtctggggtcttcggcttggttgatcattgctccaagtcatcactgggcttggggtcaggaggctcatgccaggctctaaatgtcaagtacttactgggtactggacagagctctatgtccttgatgtgtttaactcatttaatgcccctatcaaccctatgaggtaggtacaattactatctccattgtccagatgaggaaattgggtaagttaaacaacattaagcagcttactcaggtcccacagctaaagtggtgtctttatttccagcacttaaaatgtttcttggccattcttgctcttaaggctgaatgacatgtctgccataacactttgtgcttctctttaatgctgtcttctttcctccctaaacttcccatggtttctaacattcccctttccacaacagaccctgactcctatctgagaaattacagccattaaacaaaaataactactgttcttgctaatttggccaaggatgtgtcccattgcctcatgcaaagcgtggtaccttccaggtccgtggaggtgctgggctggtattgggtgctcacggccactcctgagctctcaccgaatgcaaagcatggtgctctgcaccaggtgctctgggagcttgggaagaaaccataaacacatgaacacacagataataccagcccacaaatgagcatgccagcagagttcaggaagggagaaagcactgaactgaatgggagggctttctagataacatttgcacagatgggaaagagaggagacggcatttccagcagggagaccaacttcagaagaggcacagaagtgggaatgcaactgcaattgctattctgattctaggcttggtgggaaaaaaaaaatgctggcagagactgccactagtgctaggaaaaatacgcaacagtgtacgccatcaatcagcaaagtgtggccttcatgttgcttttttcttgaatatagttttttctttaactaccatgtctattcattttcagtcttctgtgactgccattaaataagacctaagagaggcattgttttggactgaaccccaacagaggccccaaccagaccaaaccaaaatggagtcacttgtgctaagtgccacatcatcaaactgaaactttaaggaagcaggataattcccaaacagaccagttttccctgaagaacgggagatttgcagcaaccaatcagaaagggcagttaactctgccctttaactctgctttaatccttacaaggaaagtaaacttaaagtaacactgtcttggccgggtgcggtggctcacgcctataatcccagcactttgggaggccaagacaggcagaacgaggtcaggagattgagaccatcctggctaacacagtgaaacctcgtctctattaaaaatacaaaatattagctgggcgtggtggcgggcgcctgtattcccagctactcaggaggctgaggcaggagaatggcatgaacccgggaggcagagcttgcagtgagctgagatcgcaccactgcactccagcctgggtgacagagcgagattccgcctcaaaaaaaaaaaaaaaaaaaagtaaccctgtctttttttttttttgaaacagaatctcgctctgtcacccaggctggagtgcaatggtgcgatctccactcactgcaacctccgcctcctgggttcaagcgattctcctgcttcagcctcccgagtaactgggactagaggctcacgccatcacatccagctaatttttttgtttttagtagagacagggtttcaccatgttagccagattggtctcaaactactgacctcaagtgatccacccagctcggcctcccaaagtgctgggattacaggtgtgagccactatgcctggcccctgtcttattttttgtattaagctgttcccttgttcctgctcaagctactttacaaaaataaattgtcctgccacacctaatgcagcacctttctatttttaaatgggatgctgcccaattcgtgaattgatagtaaaagccaattagatcattaaaatcaatttaataaagttttttattgacactgctttcccattactacaggagagctgagtgagagaccatatggcccccaaagtctacctagccttacagaaaaggcttgctggctcctggtctagaatatcaaccttccgaaagaaaagctgccaaagccaaccagttggcactatgggtgtaaaatactcacacccatttatcctaagtttacatgaaattcaagatacccaagctaattgcattctcaaaaaaaggtatcaaagaaggtaaactgtaaaaaaaacctgatactacagattcaaatgtaactgctttccatgtttcaaaagattctggagcacactctaatctggacagattctatagatagggactgagactcccaaaggagttgggattttaataagcaaattctctccttcattcatagcaataaacacaaaaatgttcaaagatcatctgtattgtatttgttaagaatatgttaaataaaagaaaatatacacaatccattaatgtgaaataacttgaaacaaaaattcagttaaagaattggttttacaaggataaagatcaccaagttaaaatgcattaattccaagatcattttaccaaaagtatcactgagcaagatgattccccatctcccaaaatgataattaaaggagaatgtggatgtccatgtatgcttagatatttataggaatgggggaaagacatggtggacacacagatcagaggcatggtaggaaaagcccagcattgaaagacacaggccttggccgggctcagtgactcatacctgtaatcccagcatttggggaggccgagacaggcagatcacctgggtcaggagtttgagactaacctggccaacatggtgaaatcccatctcttcttaaaatacaaaaattagctgggcgtggtggcgtgagcctgcaatcccagctactcaggaggctgaggcaggagaattgcttgaactgtagagactgtagtgagctgagatcacactactgcactccagcctgggcaacagatagagactccacctcaaaaaaaaaaaaaaaaaaaggaaagaaagaaagaaagaaaaagaaagacacagccttagtcataactctgctgggaatgagtcgtgtgtccaaacacaagacacttagccaccctgggactcccctgcttcaatgaaggaatcctgctagattatctctaggggctttttccattttgagattcataaaaattaacagaacgtaagagtctgtttttgagcaagggaaaattgattaatttaatgaatgtaaacaaatagaatcctttctcagctttctgatatcttgtgtttacagtatttaaatagactttgtatacttgaaagaatatgattacttcatgtaagacctaatactatctaggcttctaagaaccttaatgtgttggacgtctcagatcagaaagaaaactgtagagaacaagcaaggaataaacacagaaatcccctgagaagagtaacgcggttaagaaacagcctgtggccttgagcagctgtgtgatcacccactaacggtgctcactttaagagtgtggcacagaaatgaggggaccgcacacatcaacacccccttccagcgctcatcaacagcagtaatgaaggccgccctccagggagaattagaatgagatttgggaaatggcatcagacacataagaaaagaacaggaaacatgttcaagaacagctcaatgttgccaaaagagcaaagatcataaaatgggggtggggagtggagagggaagactgtttcctgactttctcctgacagaggaaaacattctgggggcacagatcctggggagtaacaggaacaaaaacacccggggctggtgagtgtgcgaggaaggcgatggaccccatgggtgttcagccagaaagctgggagtatgttcctacgtggccacaaagcagggccgggaatcagacccttccaggggccgtcggagagagcgatcaggctcggagatgtggataggcagccgaacgcataggagcgggtgcgggagatcacccagagagaaggtgaagggtggggcctggctgccttgagggaggagaggctgccaaagatcaccgggagaacaaacgccaggcctgggagtgacataggaggcaggactggactcaggagacggggctcagacatctaaccaaatggaagactagctaaaacagggctgtgtgcagaagcacctttccgtaagacacacccaccagcgcaccatgtcggtttatcattgtcagggcaacactcgggagttactgcccctgtccatggcaacagcccactgactcagaagttaccaccctatttctaggaatttctgcataatccacccctcaatttgcatataattaaaagtacatatagccgggtgcggtggctcacgcctgtaatcccagcactttgggaggccgaggtgggtggatcacgaggtcagaagatcgcgaccatcctggctaacacggtgaaaccccgtctctaccaaagatacaaaaaattagccgggcgtggtggcgggcgcctgtagtcccagctactcgggaggctgaggcaggagaatggcaagaacctgggaggcggagcttgcagtgagccgagatcactgccactgcagtccagcctgggcgacagagcgacagagtgagactctgtctcaaaaaaaaaaaaattaaatggaataaataggaaatagaataccacagaacacaatagaagatgtaagagaacatccaaataataagtattgcttccagaaacatgaaagataagtgtgtgtgacctggaatgcaataggaaaagagggtctcaatttcactaggaaattgaatgatgaagtgcatcaaaaagtggggaagtcgccgggcgtggtggctcacgcctgtaatcccagcactttgggaggccgaggcgggcggatcacgaggtcaggagatccagaccatcctggctaacacagtgaaactccgtctctactaaaaaatacaaaaaattagccaggggtggtggctggtgcctgtagtcccagccacgcgggaggctgaggcaggagaatggtctgaacccgggaggccgagcttgcagagagccgagatcgcaccactgcactccaacctgggcgacagaccgagactctgtctcaaaaaaaaaaaaaaaagtgaggaagtcacagacataaaggagaggctggagaggatacaggaggcagggctggggtatgggtgaaagagagtcagagagagcaacaggaacaaaggaggagaggatagggtattcttatggggtcttgctatgttgaccaggctgaatgctgctcaagcaatccttccacgtagctgagactataggcatgccaccgctggccaggatggcgcattctgataagcaatgagtccctccttttttttttttttttttttttgggagtggggacagattctctctctgtcacccaggctggaatgctggaatgcagtggaatgcacccggctaatttttgtaattatagtagagacagggttttgccatgatggctaggctgctctcgaactcccgacctcaagtgatccacctgtcttggcctcccaaagtgctaggattacaggtgcaagccacagcacctggcctcagtccctactctctttctcttcctctctcactccctctcccttacatctgctccatcacgaaggcttggccacgaggctgcaagttaggaagatacaattcagaatacaaagtagaaagtcaaacattagccccttctagttccaaggaatttgagggtgagggtatgggaaggaaaggaggggactgaaagatgaggagaaagcagggcagtcaatggcctggaggatgcaatcaaggaatgatactgggaggggcaacttcaccagaagggcgtgaggatgcatgcaggatgcaacgtccgaataagtcagcaggtgccagtgatgaccgagctaagatgcattggctgaagtaggtatgggacaggtccattggctaatgtaaataagggacaaggtcaatggaacttcaaggtcaaggtgctagacagattgtacatgtgggtcccaaagtcctccaaggtggttgcaaggctagatgtgcagagagatcatgaaccaagtcctgggtgaacaaggctctcagtggtcatctccctgataacaaaattgctgccctctgctgatacagaacgggggcaggcctccaggagtgcagaggcaggctgagggtctggggctctaactggcccttagacagcctttcacataattttcctatttttagacccaccttcaacttcagtctgcctattcctaagtcttttggggattttgtcaaataaattgggatgctttatggcttttctcccagcagcttggaatacagctttcttgtgtctgccaagtcagctacctctcactcaagtgctttctagcttccaaaatgttgtcactatttttcttctttcttgtcctttttgttctaatggatttttctttttaaaagatccttttactcttgctttggttgggtttcaggaaggaccaaaagtaaacacatgttgaatctaccatctttacccctgagctacttttatgactgtaaaaaacaatagtgctgtattcaggctgggcacgaggctcacgcctataatcccaagcactttgggaagccaaaatgggcagattgcttgcaaccaggagtttgagcttgagcaacagggtgaaacattatctccacaaaataccaaaaaattagccggacatgatagcatgctcctgtagtcctaggtacttagggggctaagaggatcacttgagctcggagaggttgaggctgcagtgagctgtgattgtgccattgtactccagcctgggcaacagagcaagaccctgtctcacacacatacacacacacacacacacaaccaataatactatattcattttcacccacaaaaatatgtgctccctttgatgtgtgaacaaggtaccccagcctcctgcctcagggcagcctgatggagttggctaagaggtgttcagtcacacaggcactttcccctgagccaagcacatcctcccagccagaccgccaccacccatgggactgtgtctctcaatgacagttaccaccccactgggaagaaactcaccaaactgttctatgagccttggggcagggtggaatcctcatccatgtaaatcaaaagttttaaaacatcccttcactgtaatgtacacatatggaacccagatacatgatttaagaaaatcgtttcgtaagaaaatataatttcttcatgattaaatacaatgccatctagttactccttcctaaagctttgattgcaaagagtagtttcagatgtttcaccattatattcagaaaccaggagtgaattaagacaggcaatcacagaattgaagggcttcagaggtagaaagagccttagctacatggtcaaacagccagctctaaccaggaaaacatgccacccaaggctttatagaaatatgtgtgttggggccatgcccagatcttggggaccgacacaccaaggacagggcccaggcatgtacacatttatgaaactgcctagatggctctgccaggtaccaggcacccccaagaaaccacgcctcctctgtcctcataatatccctccatgtacaggggcagaacactggctctgagaatttgtgcaatgcaccaggtaggcctggcagaagagacactgaaagccaggctgacacatgttctgggtatttttacaacctgctttattctttcatttgtttatttattctttcaacagcaatgtgtcaggatcttctatgtcctaatgatagcaatatttattgagtgcttacagtctgcctggcacagttaccactttacaggggttatctcatttaatcctcatattaccagaaaggggtcccaatccagacctcaagagagggttctcagatcttgcctaagaaagaattcagggcgagtccatagagtaaagtgaaagcaagtttattaagaaagtaaaggaataaagaatagctactctagagacagagcagccccgagggcttctggttgcccatttttatggttatttcttgattatatgctaaataaagggtggattattcatgccttccctttttagaccatatagggtaacttcctgacgttgccatggcatttctaaactgacatggcgctggaggtagtgcagcagtgaagacgaccagacgtcactctcatcaccatcttggttttggctggcttctttactgtaacctgttttatcagcaaggtctttaagacctgtattttgtgccaacctcctatctcatcctgtgacttagaatgccttaactgtctgggaatgcaccctggtaggtctcagcctcattttactcagccgctattcaagatggagttgctctggttcaaatgcccctgacactcgcaacagtattatgaggtaggtacttttaatatccccactttacagttgaagaagaaagcacagagatgttaggcagtatgctaaggatgtgtaaccacccagcgggttcatcttgcctgctgcccagatagagctgatttatcaaacaggggaattgctatagagaaacaatttaattcatgcagcgctggctgaatgggagtcccgagttttattattactcaaaccagcctacctgaaaattcagagggtagggtttttcaactttggcaggcaagggaaagggcactgctgattggctggggatgtaattagaggggtgtggaaaatgtgtactgagtctgcttctgggtggggccacaggactggttggctggtccaggtcagaagggcaaaaatctcaaaaagccagtcttaggttctacaacagggatgttatctgcaggagtaattgggaaagttgctatcttgtgacctctggaataatggctggtcatcgtttatgcctacacctcagctgatctcggattcctctcatcctcctaacctggtgggctttacagaggtagtttagttttggggaagggctattgctattaaactataaactaaatttctcccaaagttcgcttgacccaagcccaggaattgcctaagggcagtttggaggctgaaggcaagataggggttggttagatcagatctctttcactgtcataattttctcactgttatcatttttgcaaaggcagtttcaaacacacagctagtaaatggtggtgctcaaagacagctccagaacctgggctccctcctaactgctaggatcaactgcctctcaggtgctctgtttccaggtatcacatttgttatcaggtgctctgtttccaggtatcacatttgttaagaggcgtagagagaaggagagatgggtgagcagtattacaacccaaccttcagtagggcagaggtggtcacccaggagccatcagaagatagaggggtgttcttgccccagaggttgggccagtgagctgagtcttgaatgacaggaagtaggaggggatgagggtgagggaggagtccgggcagcagaaatcacagaagaataccattgggaataccacagtagtgtaacagatccaaatttcagtgcctacactcaggtagcaagacgtaccatttcctcttttctttgagaccttaatgtctattaggatcccccattcctttgggtgtcagaaatagtttaattcagaggcagggtccacctttgccctcaaaccatgtcttcaactgggggctccatggagccatggtacaaatctatccttactcatcatctagccacaatgttcctactgaggctgcccacacggggtccttgaccaagaggtctgtggtttttcccgtcagaataccttcttgccttagtgaactctagccctcctgtccttctctagcaagagtcctcactctctcttccttcactgatacgcttctccaaagattctcatcaccaggtctccatgtcttcacctctcagccttcattcactactcaatacatggtcagaaggattctgttcccacaacccatccacattgttccgctaagatcacctatgggcaccatgttgctaaatccagcagtagctcttctcttcgtcttggctgacttctcactctcattccatgatagcacagtctcctgcattccctgctactactttaaccacacctgagcataaccttgatttttctcgtattgtcttgattttacctccagcctcccccaggaccaaatgtttaatccatcaacacgttctatcaattctattgtcaacaaatataggtcaagtccatggacttctcttcggtgccattgttaataccctgacataagctcctcttctctctcacctggattcatgaaacagcctctttacttggtctctctgcttctacgaaatgcagtccccacaaagcagtcacagtgatcttcacacacacacacacacacacacacacacacacacacatctgattatggccaggtgcggtggggtatgcctgtaatcccagcactttgggaggccaaggcaggtggataacttgagcccaggagttcaagaccaggctgggcaacatggtgaaaccctatctccacaaaaaaacacaaaaatgagccaggcatggtggcacgcacctgtagtcccagctactcggaaggctgaggagggaggattgcttgagcccaggaggtcaaggctacagtgagccatgattgcaccactgcactccagcctgagtgacagagcaagactctgtctttaaaaaaaaaaaaaaagaaagaaagaaggaaaaaaaagagtcagtataatgtttcatcacacttgaatactttactgtacggttcctaaaaaaaagcttattctcatataaaaccacaggacaaatatcaaagacagaaaattaacactgatatattattcccattaaatccttagacctcattcaagctttgtccaataatatcccttgtaacaaataacttcagaattacctgttgtaccaggttgtcatgtctccttagcctcctgcaacttggattggttccttagtcttcctttgacatccatgaagattacaggcaaagccaaggagggaggatcccttgagcccaggaattcaaaatcggcctgggcaacatagcaagacctcgtctctaccagtaataacaaaaaattaggttgggtaccgtggctcacgcctataatcccaacactttgggaggccgaggtgggtggatcacctgaggtcaggagttcgggaccagcctggccaacatggtgaaacccagtctctactaaaaatacaaaaaattagctgggcatgttggtgcacgcccgtaatcccagctactcaggaggctgaggcaggaagatctctttaacccgggaggcggaggttgcagtgagctgagattgtgccattgcactccagcctgggtgacagagcaagactctgtctcaaaaaaaaaaaaaaaaaattagctgggtgtggtggcatgcaccttcggtcccagttactcaggaggctgagatgggagaatcactggagcccaggcagttgaggctgcagtgagctgagattgcacccctgcactccagcctagacaacagagcaagaccccatctcaaaaaaaaaaaaaagattacaggcaagttaaactgtaggctgtccatcaatttgggtttggctttttagattcaggtaatgcatccttggcatacagttatttcattgcatcttattaagtaatacataatttcagttttcattgcatcttattaagtaatacataatttcggtttgcccgtttgttgatgatgttcagtttggtcacttgattaagggatggggtggggggaggtcttctggacttctgtactgtaaagagactttttctctttataattattgagtattttcataattcattcattcatttgtgaatgaatgaataattcataagtgaataaattcattcattcattcacttattcatttaaccaacgtgatccatggatttctatctttttcagtccattattctcattaatctgatgcttcaattgtcccagtttgggccgatggaaaccatttcaagatggcttctgtgtctttttatttgtctccatccttcttggatcccacacttaccttctggaatatgatgttctaggttcctcaggttcctcttgtactctcctagcccagtcatacttctttttaaacaagatgtttttgaagagacaggggtctgctctgttgcccaggttgaagtgcagtggcacaatcacagctcacggcagcctcgcactcctggactcaagcgatcctcccacctcagcctcccgagtagccaggactacaggcatgcaccactacctggctaattttttaaaaaaaatatgtagctatgttgcacaggctgctcttgaactcctggcctcaagcaatcctttccccttggcctcccaaaatgtggggattacaggtggaagccaccatgcccatgcccagcccccagccatccttctgccactcatattttgacacaccatgccaggtagcacttccacccccatattcactctgtccaggatctaacacccccaccccgcataccaggccacccaccatggtagaactccaacaccccatgccaggcagcgctcctaggtggatgcctgcctcaccttgcttgaatttttttttttttttgaggtagattctcactctgtcacccaggctggaatgcagtggcacaatcttggctcactgcaacctctgcctcccaggctcaagtgattctcccacttcagcctcccgagtagctaggactccaggtgcccgccaccactcccagctaatttttgtatttttagtacagacagggtttcaccatgttggccaggctggtcacgaactcctgacctcaagtgatccacccgcctcagcctcccaaagtgctgggattacaggcgtgagccacagagcctgacctcttgcttgaattctgatacccgctgcatggatgctctcacctgggagatgtctgatgcctcacatagggctgccctcttatgcggagcacttctttaccccactcatgatcagacaccccacactgggctgtcatcctacacaaatgctttccacactccaatgctccgatgctccaagctgggccggccttcagcagggaggccttcttatccgactcaggttccaatgctctgcatcagccaccaaacctcaccctggctatctctgacagcccaggctaggccatccccacccctcccatgtggataccctcctcacctgcttcaggatggtagggcttccctgctgctctgtatggatgtccaccttgcttggtcccacctaatgacttttaaaaggatttgttcaggaagagaaagaaacggaagaagtgggaaagagaaagaaataagcaaggcttttattttagaatcaaggggtgcacgtgcaggtttgttacaagtcttccatgatgctacagtttgaggtatgaatggtcccgtcatccatgtagtaagtagggtacccaataggtagtttctcagcccttgcctcaccacctctctcccctctctattagtttgcattgtctatttttcccatctttatgtccatgtgtaccaaatgcttagctcccacttataagtgagaacaggcagtatttggttttctctttctttgtcagttggcttaggataatgtcctccagctgcctccatgttgctgcaaagggcatgatatcatcattttttttatgctgcatggtattccatggtgtatatgtaccacattttctttttgtttgtttgttttttgttttttgttttgagacggagtctccctctgtcgtgcaggctggagtgcggtggcatgatcccagctcactgcaagctccgcctcccgggttcacaccattctcccgcctcagcctcccaagtagctggggctacaggcgcccatcactaagcccggctaattttttttttttttttttttttgtatttttagtagagacagggtttcaccgtgttagccaggatggtctcgatctcctgacctcgtgatccacccgactcggcctcccaaagtgctgggattacaggcgtgagccacctcattttctttatccagcccaccactgatgggcacctggaaaagcccattctcttgtaaacccattctaatcagacttttgtcccatccttccacagaaactgctcccaacaagttaaccatgacctccacaatggttgattctcacagctcactcaacagagctcttcctccttctgggtatgcctggttcacttgggtttgaggatacacattctcctggtttccttcctgcctcgtggaaatgccaaagtagagaagccacctgcccgtgaacctaagacactaaaatcctgaagtgtgtggactgcattcctgaattaaaggctaccaaaaatgtcactgtcatgacatacccaccccagatatatacaaagcagttagacgggaacaaaattaaggggataattattcattacaaaactactaccttcaccagaggccaaggttaaaataataatctaaacactaatcttgttcttagttttaattaattttctttaagatgctcatcaccattgagaaacctgcacaaatgaatgctaattcatttcactgaagtgaaagagaaaggggcttttttgttttaaatgcttttctgatttttttttaaattaacactgctaacctatttcatgtttaaaatcttctctgccgaggctcaagttaggtttcccaatggaagaagaatacagctcctgggaattagggcaaaatggcttgttaaatgaatgaagacagaggctgaaatacaaatattttgtgaagtgttcatattttatcagccaaaatgagctatagcaaatcatcacatgtctaaaaaatgtagagaatactgggagctgctcgttttacatcgagtcgaccttctgttgctttaatgacctgatctgaaataacctggcaggctcagcatcacccccaaggtccgtgtcagcaaagggacccactgtgtccatcactgacatgacgcacgcgcctggctgccactcaccagcagggggcactgcgccggggcctttctgtaggcaaaaccactcaaaagctaaggattgagaaacatgtattccgggagacagaaaaatgtgcgtcagtgtcaccatctcagacaaactcattgccacaccatcgacaggacatcttcatgtgtgtcttcataacaatatccactgtagggtgttctgaggcccagagcctatcccagaattacaaataaaatagtagtgaagccaaaaataccaagtctatctgaaaccctttcagtgagcatgatttttattttattttatattttgagatagggtctctctcggtcactcagccgggagtgcagtgacacaatgataactcactgcagacttgaattcccgggactcaagtggtcctcccacctcagcctcctcagtagctaggactatggcatgcaccaccatgctcagctgaatttttttttattttttgtagagacaggttctcactttgttgcctatgctggtctggaactcctggcctcaagcaatcctcccacctcggcctcccaaagtgctgggattacaggtatgagtcaccgctcctggtcaacatctacattttatatttggggaaagtggggcccataaattatgtattttgtgatatatgagagacaaaataagagttttaattgcatttaatatttaaaagactgtaatggctgacccataaaacaggattttatccatgatttcctctctagtgaatcattcctatcagcacaaatttttcccatgttaaaaaaaaaataagttttggctaggtgcagtggctcatgcctgtaatcccagcagtttgggaggccaaggtaggaggatcacctgaggccaagacttgaagacttatctgagcaacataatgagactgctgtctctaccaaaaaaaaaaaaaaaattaaaaattagctggacatggtggcatgcacctgtagtcccagctactcgggaggctaaagggggaggaccccttgagcccaggagtttgaggctgcaatgagtggtgattgcaccacatcactccactccactccactccctgtctccaaaaaaagaaaaaaaaaaaaaaaaagttttggcctttctttcccttctcattactgcccccatttctctctttccctttatagggaagttgtgtggtaaacacactctacgatgagtattcacatccttgaataaactcctccccttgaaggaggacatagtttgcttgagtgtgagcaaagctgtgacttgcttctaaccaactgtatacagcaaaatcaataggatgtcactcccaagattacatactattaagactccatcttgctatcaaactcactctaacactctctctcaagatagttctgaagaaataagcagccaggataggaggccaatctatcaagaagctaaagacaacctctaagagctgaaagccaccaagaagccaggactctaagtcccacaaccacaaggaaatgagttctatcaccaacctgagtgagcttgaaagcaccttcttccccagttgagcctccagattagaacacagtcaagctaatcccttgatggcagccctgtgagaccctaagaagaggacccagttaatctgtgcccagactcttgtgagataataaatgcatgttttcttttaagtcactaagtttgtggtaattttttatgcagctgtgttcaaggatttcccaacaccactctcagcttcaatgatcactagaaggactcgcagaattcagcagagccattacactcacagttacagtttatcacagtgagcagatacagattaaaatcatcaatgaaaaaagatgcatagggaagaatcaggagagaccaggcatcagtttccagttgttctctcaccatggagtcatgtagacagcacttaattctcccagcaatgatgaatgacagctcccacagagtattaccaaacagggaaactcactgaagcctttctgtccagggcttttattgaaggttggttacctaggcatggctgactgcctgcatggctgactcgagtctccagcacctccagagattgagatcatactgggtagtacaaggcccccgccatcaatcacattgttaacatgaactatcttacatggcccaaggcctcagataaacaaagacattgttaacagacaggagattccaggagattagaggttgtctcccagtagccaggaaaggaccaaacctttctttggaatgtggaagaatcagactacctaaacctgctgaatcctttatagcacagcagaaatagataactaataaagattctggtacctagaagtagggtgctgctgtagaagtggctttggaataaggtaatgggtggaggctggaagaattgtgatgagcatcatagaaaaagtataaattgctttaaacaagccattaatagaaatctggacttggagaatggtaccggtgatagctcagaaggaagtgaggaccatgttattagaaaatgaaggaaggaaaggctgggtgcagtggctcatgactgtaatcccagtactttgggaggccaaggtgagtggatcacttgaggtcagaagttcgagaccagcctgggcaaaatgatgaaaccccatctctaccaagaagaagaagaagaagaagaagaagaagaagaagaagaagaagaaggagaaggagaaggagaaggagaaggagaaggagaaggagaggaggaggaggaggaggaggaggaggaggaagaggaagaggaagaggaagaagaagaagaagaagaagaggaaagaaaaaatacaaaaattagctaggcatggtggcgggcatctataatcccagctactcaggaggctgagccaaaagaatcatatgaacctgggaggtggaggttgcagtgagccaaaatcatgccactgcactccagcctgagtgatggagtgaaactctgtcaggaaagaaaaagacagaagaaagaaaaagaaagaaagaaggagaaagaaaagaaaaagagagaaagaaagaaaaagaaagaaagaaagaaagaaagaaagaaagaaagaaagaggaagagagggagagagggaaggagggaggaaggaaggaagaaagaaaaaggaaaggaagggaaggaaagaaggaaggaagagagagagagaagaaggaaggaacagggacagtaaataaggtagaaatcaggagacattcatgggactggggccaatcagacatcaacatggtggattagcatccaagatggagtaatgtttgtctccacaggaagagacgtgaatcactggggattagactgtggtggacagactgtaagatcatcctttataatcctcaaattctagtattaatgcacttttagaatccccttcccttgagtatgggcaggatccataactcgccttaaccaatagaacaggacaaaggtgatgtgacatcattcccagtagcatgttacattatgctatggtaccatgttacgttaaataagattccatcttgctagcagactcacccttggaactctctcccttgctagccatgaggactatgttagagaatcgttaagtttcaagaaactgcaggtgtcttctactggctgaggatgcctcacagtgtccagatgtttagtcaaactttgttctggttgtttctatgaaggtgttttgtgtgagattaacatttaaatcagtggactttgagcaaagcagattgccctccataatgtgagtgggcctcatccaatcagtagaaggcctaaatagaacaaaaatactgacctcccccaagcaagaaggaattctgcagcagatgccttgacttgaattgcagtgttagctccctctagggcaggggtgtccaatcttttggtttccctgggacacattgaaagaacaattgtcttgggccacatataaaatacacggatgctaatgacaactgatgagacaaaaataaatatcacaaaaaaactcataatgttttaagaaagtttatgaatttgtgttgggcctcattcgaagccatcctgggtcacatgccccatgggctgtggattggacaagcttgctctagggtcactgtcctgatgatctttggatctgaactacagcactaactcttctctgggtctccatgctactggcccaccctgcaatttttggacttgtcagcctctgtaatcatgtgagctaattccttaaaataaatttctctctctctctctctctctttctatatatatatatatatatatatatatatatatatatatatatacacacacacacacacacatatacaaatatatacatatacatacacacacatgtacacacacacatatatatacacatacacacacacacgcatcctattgattctgtttctctggagaacctgagtagtagagtaagggaacaatgaattgaatgattgtgaatttcccatcaggtaccatagaggccagagggcagtggaaaaacatttctaaactgctgaaaaaggccagggatagtggctcacgcctgtaatcccagcactttgggaggccgaggtgggcggatcacttgaggccagtagtttgagactggcctgggcaacatggcaaaaccccatctctactaaaaatacataaattagccgggcatggtggtgcatgcctgtaatcccagctactcaggaggctgaggcacaagaattgcttgaactcaggaggtagaggttgcagtgagctgagatcgtgccattgcactccagcctgggcaacagagtgagactctgtctcaaaaaaaaaaagtgctgaaagaaaagaactgttaacatagaatttcatatccaaataaaatgcccttcactaatgaaggtacaataaaaacattctcggccgggcgcggtgactcaaagcctgtaatcccagcactttgggaggccgaggcgggtggatcacgaggtcaggagatcgagaccatcctggctaacacggtgaaaccccgtctctactaaaaatacaaaaaattagccgggcgcggtggcgggcgcctgtagtcccagctactcgtaaggctgaggcaggagaatggtgtgaacccgggaggcggagcttgcagtgagccgagatagcgccactgcactcaggcctgggcaaaagagcgagactccgtctcaaaaaaaaaaaaaaaaaattctcagatgaaggaaaatgaagagaatttgtcaccagcaaacctgctccaaagaaatgctgaaataaattctggcagaagggaaatcaaaccagtgtgtaacttggagcttgaggaatgaggaagagcaacataaatggaaaatatctggataaatatagtaggttatttttctccctttaagtttcaaaaaaatatgtgtggtggctagaagcaaaaattataacataatctggtggggttttaaaattgtatgtagatacaatgcacacggcaactacaacataaatgagggcaaggggtcctatctgggaataaggtttctctgtcctccacactgaattggtagaaggtgttatcagtgaaaacggcagagtgagaacatccaaagagcctctcctctatagaagcagtgagaacatgggtgaaattttttttttagacggagtctcggtctgtcacccaggctggaatgcagtggcgcgatctcggctcactgcaagctccgcctcccgggttcacgccattctcctgcctctgcctcacgagtagctgggactacaggcgcccgccaccacgcccggctttttttttttttttggatttttagtagacacggggtttcaccgtggtctcgatctcctgaccttgtgatccgcccgcctcggcctcccaaagtgctgtgatcacaggcatgagccaccgcgcccggcccatgggtgaaattttttagaatctactttttcaggactgtggagacttgctgagcatttattttagaaaaatggctgaatctcagagagaacagtgagttttgtggtgatttaatttgccctattctcatccccctgccctcactccatggtaaccttgaaaaccagcagattgctatcatggtgaaaaccagcacactggcagtcactggagggggcaaatggaattggagctccttcaaagtccccttctcagagaattttcattatttgacctatctctggctccttaaaagactccagtcataggctatctttatttgacttgactcagatcccagggcaaatagtcctcttgctatgtcaccaggctggtctcgaactcccaggctcaagtgattctcctgcctcagcttcccaaagtgctggaattacaggcatgagccaccatgcctggccagaatttgcatcttgaactggtttagatagggatcaaatgcctttgctatctattgagatgatcaaatggttttgctcctttagtgtgtctatatgatgaagtacactgattggttttcgaatggtaaactaacttcgtactcctggcgtaaattctacttgatcagatgcattggactaaaggctgttttttccctcgtgcttcttgtactccattaagcctcatttcttctatttctgattcgctttttccacccacataattgggacacgtcaaaattaagtgagttatgcaaagtacagtaaacatgataaagtattttggggattaaacttatgcttttacaaaaagaaataatttaggtaaataatacaaggattatatgttatcatactttataagatactgatgatttcttaaagatatttgagaactacaccctttactgccacagccaaataagtggcacttgtcaagtaaactgagatatttgaagcagactctgactacagcaccccacaaaatacaaaactatgacccacattcactctaaagctatttctgggccagacgtggtggctcacccctataatcccagcactttgggaggccaaggtgggtggatcatttgaggtcagaagttcaagaccagcctggccaacatggtgaaacccgtctccactaaaaatacaaaaattagccaggcatggtggcgtgcgcctgtaatctcagctatttgggaggctgagggaggagaatagcttgaatccaggaggcagaggttgcagtgagctgagatcatgccactgcactccagcctgggtgactccaggaaggaaggaaagaaggaagggagggagggagggagggaaggggggaaggagggaaagaaagaaataaagcaacaaagcaagaaaagaaaagaaagaaagaaaaaagaaagaaagaaagaggatggaaggaaggagacggagggaggagaagggaagggaggggaagaagggaggggaacggaaaggggaaagaaagggaagggaaggggaagagaggaaggagctacttctgaactcaagcccagaacaaaatctgtgtaccaggtgattctagatcatgatgctactaaaagtatcactgttaattaataaaacaaaactaaaataaaataaagttataaatgtgtaagagggaaaagggtggaaacatgaagaaagaagcaggttgcttgttttaaatatgaatatgcagcaccaaatcaggatttttagtagtaaaacactgcaacatgatcaccccgaaacaaaacacacatgaaaattaatgtgccttatcagattctgaaagtcctatttgcttaccattttcctcataagaaagctgagaactcactgctcactgatgtgactttctgctctgcgcacacctaaggcatgaacaagagccaagaatctattcctttcgaataagaggagtctcgttcctatagaacatgggtcttgaaagggctctttgaagccctaaccaaaaagtacacaaagatggaaagagtctaggctggggaataggcaaaaataagaaacaagtaaaatgaaagtgatgacggcacagttttgtaatctcctccaatcccctcataaaacagggagatcaattaggatagcaaaagataaaacccacagagaatgccatcaaccaaatgcatgcagtcaaccagcatatgaaaagaagctcaacatcactgatcactagagaaatgcaaatcaaaatcacaatgagataccatctcacaccagtcagaatggctgttaccaaaaggtcaaaaaataacaggtgctggtgaggttgtagcgaaaagggaacacttatacgctgttggtgggagtgtaaattagttcaaccattgtagaaagcagtgggacaattcctcaaagacgtaaaaacagaactaccattcaacccagcaatcccattgctgggtatacacccaaatgaatataaatcattctaccttaaagacacatgcatgtgtacattcactgaagcactagttacaatagcacaggcatggaatcaatgtaggtgaccatcaacaacagactggataaagaaaatgtggtacatatacaccatggaatactatgcagccatcaaaaagaacgagggccaggtgtggtggctcatgcctgtaatcccagcattttgggagtccaaggtgggcagattacttcaggtcaggaatttgagactagcctgcccaacatggcaaaaccccatctttactgaaaatacaaaaattagctgaacgtggtggcacatgcctgtagtcccagctacttgggaggctgaggcaggagactggcttgaaaccaggaggcggaagttgcagtgagccaatatcgcaccactgcactccagccttggtgacagagtgagatcctgactcaaaaaacaacaacaaaaatgagatcaggtcctttgtgggaaaatggctggaactggaggccattagccttggcaaactaatgcaggaacagaaaatcaaataatgtatgttctcactaataagtggaatgagaacacatggacagatagaggggaacaacacacactggggggcctgcttgagggtggagggtggaaggagggagaggaccagaaaaaataactgttgggtgctagtatctgggtcacaaaataatctgtacaacaaacccccatgacacaagtttacctatataacacacctgcacatgtacccctgaacttagaagttttaaaaaacacacatatataaaactataatcacacacacacacacacacacacacacaaaccacagacagcagtcagacccacagggaatgacatcaggccaggggcagagggaaatgagggtcttaagtgctggggagctaagactgccaacaggtggtcagccccacaggaggggctcccacccagacgcagatctaggcacagcaggcaaaactgggcagggctttgctgcaaaaaggcagttgaccatcaagatgctcaggaagcaggtgcagtggcccacacctgtaatcccagcactttgggaagctgcggtaggaggattgcttgaggccaggtgttcgagaccagcctgggcaacatagtgaaacacctatctgcaaaaaaatttcaaaaaatcagcttattctggcctgtagtcccagctactcagaaggctgaggcaggaggatcacttgagcccaggagttcgaggtttcagcaagcttgacggcaccactgcactccagcctgggcaacagagtgagaccctgtctcaaaaaaaaaagactctcagaagcacccagtggcctccctccccttctggagttggagagctcacactgaggagaaatcgttgcaaggagaccccaacttgatcagggctgggcacctgggcataaaaaaaaaaatttagatgctagtcagagaggggaccagagaaagcaaatagcagaaagcactgaagagatgactgcacatattttctaagactttctgataaaatgggaaatgagagaaagacactctggcccatcctcaatatagaaatttccttctaaaaatacaacttcaacaacagaaaaagattatggtcaatcctcactcaaaaatagaataaagaaagaaaaataatccaaataacatatatttagaggataatattcaccagaaaaaaataaaactacggggtatatgaaaacattaagctaatatttcaaaatgaattacagaaaattaagaaaataggagaagctatgaaagaaaggcataaacacaaactagaaaactcagaaatgagatggccagacaataggcagatgtgagaacagtttacagagctcagaaacaattggcagaaacaagaaaaaaaggaagaaaataaaacagaaatgaagaaaaggatagaaagcattaaaataaaaatgataaaagtaaaaaataagaggccaggcataggggctcccacccatagtcccagcacttcgggaggccgaggcaggaggattgcttgagcccaggagttccagaacagcctgagacacgtagcaataccccgtctctacaaaacttaaacaaaattagccaggtgtggtggctcatgcctgcggtctcagctactcggggaggctgaggcaggagaatcacttgagccagggaattcaaggctgcagtgagccgtgttcacaccactgcattccagcctgggtcccagagaaagatcctgtctcaagagaaaaataaaaaaatgtaaacaaaagacagccaatgtatgtacagaaaaaattagagccttcatctttgccaatcaacatcctggcacattggtttgttgtttccaactttttattcccaacagccattctgaatggttttttggtttttggtttttggtttttgtttgttggagacagagtcttgctctgtcacccaggctggagtgcaatggcatgatctcagctcactgcaacctccgcctcctgggttcaagtgattctcctgcctcagcctcccgagtacctgggattacaggtgtgtgccaccatgcctggctaatttttatatttttggtagagacagggttttgccatgctggccaggctgctctccaactcctgacctcaggtgatccacccacctcggcctcccaaagtgctgggattataggtgtgagccaccgcaccggccctgaatggtttttgaatgatctcacacagagtatatgatttggacactagtgcagtagagtcttacaatgaaacagagtatagggttaccaaaggaaagaaggcagaagatggaatttgaggtaatcagcatgagagaaagacatatctgcaactaacctgagtacagctgaaatcatccctttcctatggagtgccttagtctatgtcttaactgcaaattgtaggagatgatcatttcaagaaggcaaaggtttgtcatctgtgtttttaatcccaagatggtgcctaccatcagtgatgacctgctgcggtatcctcattccagtaatcactccctcagcagtgcgattgtgatgaccgaaaggaagcctctgctattgtttctaccaccagctttatcaaaaccaagacatggaccaggggcagtggctcacacctgtaatcccagctactcaggaggctgaggcacaagaatcgcctgaatccagggggtggagcttgcagtgagccgagattgtgccagtgcactccagtctgggtgacagagtcagactctgtctcaaaaatgaaaaaaaagtaagtcatggtcttcataatctacagagactcctcacttgcgtatgttgcagggaacactccttgcagatcagaaaaactagactgacatagctcatttttggaaactgcccttgagaatgtcatcgaggccaggagtggtggctcacacctgtaattccagcactttgggaggccaaggagggtggatcacctgaggtcaggagtttgagaccagcctggccaacatgtgaaaccccatctctactaaaaatacaaaatttagcagggcgtagtggcgcatacctacagtcccagctactcaggaggctgaggcaggagaattgcttggacccaggaggcagaggctgcagtgagctgagactgtgcactccagcctgggtaacagagtgagactccgcctcaaaaaaaaaaagtcatcgaagtgaattttaactaggcacgatgattgttttcatggttacccttggactaaattttaggagctggaatgagtgagacgtgattgaacagagaggccaggatggtggcattaaaaggggttcatctcagttcttcataagtaggaagtacatatatttataattttcacttatcacagggtaaatttaaaattgattcattaaaagatgatctttttcaagaattcaaaggacatagaattttgtaacatgcaatattttttaattacttgtctttttttctttctaattctaccccccaagtctatttttttataaggtcattgatacataaatagtttcagggaggatgatatattatctacagactttctatgtagtgaacctgcctacatataaatgtcaattcatccaactactgtgttggaataatttctgtggattgaacctgctagggcaaagtaaatgcaaaatctgcattttgaggctgggcgcagtggctcatgcctgcaatcccagcactttgggagtctgaggcgggcagatcacctgaggtgaggcgggcagatcacctgaggtcaggagttcaagaccagcctggccaacatgatgaaacccccgtctctactaaaaatacaaaaattatccaggcatagtggcaggtgcctgtggtcccagctactcgggaggctgaggcaggaaaatcaatggaaccctggaggcggaggttgcagtgagccgatatcacaccactgcactccagcctgggtgacagagggagactctgtctcaaaaaaaaaaaaaaatttcctataacataactcgagtgagaattctccatttcctaaaactgtacaaacatcagatatcagtatttgtaatcactgataatgtaatattacaaagaaatttatttttcttctattaatgttaagctacatcatcctggtgtagatttattagtcatttgcgttatttcattttcctctgttccttttattttcactttccttgtaatattagtctctttgttactgatttctaagagttcattcatgtttaatgatgttaacattttgtcaaacattgcaaatgagataccttgttttttcctgtttattttaccgtggtggttaattttttggttgtacagaaattatgtattgaaatataatcaagtgcggttttaaaaagaaaaaaaaggcaagaaaaggaacagaaaaaatctttttgtttttttgagacaggattttgctctgttgctcaaactggagtgcagtgcaatcaaggctcattgtagcctcaaactcctgggctcaaacaatcatctcatctcagcctcccaggtagctgggaccataggcacatgccatcaggcccagctaatttttgtgtttttcatagaaatgggatttcaccatgttacccagtctggtctcgaattcctgggctcaagtaatctgtccaccgtagcttcccaaattgctgggattacaggcgtaagccaccactcctggcctgaaaatactttaaaaaaaaaaccgtaattcaaaaatctcccctgaaattaaaaataagaaaaaaaagacttgaatcttcatacttacagggcacactacattcctgggaaaatcagttcagcatggccaactttgagacatattttagtaaaatgatggaactttaaagaaaaaatcctttggacattcgggcaaaaagacaaagtgactttttaagaagaaggaaatccgcttggcatcaaacttttcaacagcaaccctcaaagccagaagacacgggagtagcctatttaagatcctcaaggaaagaaaatgtccactgaagatcttatcctgaataactctcatataaattcatggactaactctatgagcacacaagacaccagataagctcttccttcttcctctttccccatgccttcctgagagaattcagtcctaactcagccatcaggtatgggagagcaaggtagttgcctgcacagggggagggcaggagcagcggtgagggccaaaaatgaggtgggatagctcaagtagggtgaggaagacgtttgcagaggagggcagcctagcagaggcttagcaggaagagaaaggcatctacaaaaggtggcaacctggcatgggtgcgagcaaaaaggagtgaaaaaagtgtccacacccagggcagcctgacccaggaagtcagagcttgaatagaaatagaaagacagtctggttgggatgtgaaaacccacacaaaagaaggaggcatcagtgtgtgtgaagggaagagtagggcatcagaggccaagtaggctgagagtgtgcagcagacaacctggcccagggagtagacgcccaactggggtgagaagggcagccacgaagggtgcatcctggcaccgagagtgatattccacgcagagtgagaggggcatctatgcaaggcatgaaggtggcagtaaagatgggagatttgttacatacagggaggttgtgcaagtaagtaaatacattaaagataatagggactgggtttctcactgtcagagaaaagggatacaaacatggaaaaggagaaaactacagtgaactctgtggtattgaactggaattggaggtatagtgtgactcatagagagaaaaaagagtagagtagattggattggattagattgaattggattgactagattgatagatggatagatggaggggagataatggatggatggatggatcaagcaatcaatggaatcaatgaatcaatcaatcgagtgatggatggataaatggatgggtggatggataagaagaaggaaggaagaaaggaaagaagaaagggtagatggatgggtgatagatggatggatggatggatggatgggtggtggatgaatgggtggatgatgaatgaaaaaatggatggatggatgcatggatgcatgggtaaatgggtagatgaatagatggatggatgatgaatgaaaggatgggtggatggacggatgatgaaaggttgcatggatggatggatgggtagatggatggatagatgggagatggaatgatggatggatgaattgatggatggatggatgatggatggatgagtggatgggtgggtagatggatggatggatgaatgatggatggatggatagaaggatggatggatggatagaaggatggatgggtggatggatgggtagatggatggatgatggatgaaaggatggatggatggatgggtaggtatatggataaatggatgatggatggaaggatggatggatggaaggatggatagatgataaaaaacgcaaatgtgtaaatgtgtggtatatgacatacatatatatcccttagcctgtttacagagtgtgcctgggaacaactacctgacagtattgatgagcacacctagaatccttagatcttagtttctaagtatcatttcacatgagaagaaatcagggctccttgactgagtccaggaaaatgattcagtccaggcctaggacaggtgcaagatatgcctagaatatcttgttgttcagaaagtaaggaaattctcaatgaatgatgggaacatgtcaaaatgacacaagaatgagctcaaagaggatcccactggcctaaatctgagacagttcgaatatcaaaataaataaataataataatggagtataattgatccaataaaataaaatccttaagtccgatataaatacatgaatgaataaattgagtttgatcagcaacagggtatttacaaagtttttgtatgtttgtttgtttgtgtgtttgtttttgagacgaattctcactctgtcacccaggctggagcacagtgccatgatctcagctcaccgcaacctctgcctcccaggttcaagtgattctcctgcctcagcctcccatgtagctgggattacaggcatgcgccaccatgcccaactaattttgtatttttaatagagatggggtttctccatgttggtctggtctcgaagtctgacctcaggtgatccacccgccttgccctcccaaagtgctgggtgtgagccaccgcgcccagccctttacactgtttaaagtacctccacatggttggatggatgatggaaggatgcacggatggatggatgggtggatggatggatagataggggatgctaattaagaggcaaagagtaactttacagcagaaaagtctggcaaatgccactttattaagtgatcacagcgaacaggacaaattaaaattgtgtgacagatacatggagaatgcaacatccacctttgcaatatccctccccaaaatgcacaacctgagtctaatcataagatgtcatcagatgaacccaacttgaaggacattctacaaattaactggtccctaatcttcaaaagtgtcgaagtcatcaaagtgaaggaatcatcctgtccctttggctcctccggtctggaggaggaggagtcagtctgggggaggtatcttccaaactggaagagctaaagggacatgaccactaatgtctcttagcaatgcatgatcctggctgaatccttttgctataacagacattatgaaaacaataggtgaaccttgagttgaggctgaggattaaatgttgctatggactgaatgctgatgtgctcccaaaatgcatatattgaagccccaacccctaatgtaatggtattattaggagttggagtcttgggaggtgattaggtttagatgaggtcatcaggatggggtccttatgatgggaccagtacccttatagaagagtatagaagacagcaggagtttttgtgccctcttcacacccaacccttcccaccagagccgtgtgaggatacagcaagacaactatctgcaagccaggaagacagccctcaccaggaactggatcacttggcactttgatcttgtactttctgccttcagaacggtgagaaataaatatctgctgtttaagccatccagtcaatggtatttcattacggcagcctaatctgactaagacacatgttagtaatggatccctgtaatcttcctaagtttttctaataataatgaggttatgttggtgattgttttcgtaggaaatacacactaaagtatttggggtgacaaagcatccggcaacttatcctcaaatgagttggagagaaaaaatttctttcctatttcttttcttttccttttttttttttttttttttttgcgggggtggtcgggacagagtcctgctctatcacccaggctggagtgcaatggcacaatcttggctcactgcaacctccgcctcccaggttcaagtgattctcctgcctcagcctcctgaatagctaggactacaggcgcccaccaccacgcccggctaatttttgtatttttagtagagatggggtttcaccatgttggccaggctggtctcgaactcctgacctcaggtgatccacccacctcagtctcccaaagtgctgggattatgcgcatgagccaccatgcctggtcgaaaaaatttctttgggtcctccaacttttccacagattttttattgaagattaaaaagacagatgttaaagtaaacaaaaaagattcaggaactattgttgccatgagcctttaatgaaggcatctactggagaacaaacttcagaatactaagaaatgattaggcaggttccagttttggcaaagggataatggtaaatactgagtatatttagaactaggacaaaatgatggggtaggggtgccaggacaatatataacggtgatgtgtttgatagtgtagacaaaatgcaaccatcaaaaatagtgggggagaatgtatagaataaactcaagctgggcgtggtggcacacgcctgtagtcccagctacttgagaggctgaggtgggaggaccacttgagcccaggaggtggaggctgcagtgagccgtaatggtgccactgcactccagcctgggcaacagagtaagaccctaactctaataataacagtagtaacagtaattaacttgttgattgtcttattgctgttaactgagagtaaactaattttattttaagttagatgctggataaaagggaaaaaaaagagagaggaagaattacaagctatttaaaacattgctcatgatagggaagccaacacagtaccaaaataggtagggaggtggtatttaggttattatgtaaaggtattactataaagataaccattaggagacaaaactccaagcctttctaaacaccaaagggaatatcaagagagacaaagacagagaaagaaagagagagcaagagagagaaaaccaaaacaaagacactacagagaaactaagtgcagatgttgctcctcttaggatggggttacatcctgataagcccattcattgtaagttgaaactgtcgtaagccagaaatgcatttaacgcatctaacctactgaacaacataacagcctagctgaccttaaacacggtcagacacttccattagcctacaattgggcaaaatcatctaaaaaggctgttttataataaagtaagtgctgaatatctcatagaagttattgaacattgtactgcaggtgaaaaaatagattggttgtacaagtactcaaagtatggcttctactgaacgaagatcacttttgcatcatcgtaaagtcaaaaaatttaagttgatccaatgtacgccaaggaccttctgaatacaaagaaaagggtcactgcactcaggccaccacctgtctcaagcgagacaggacaacaaaaatcactgctcatgttcttccaaagcaccaccccaagtgtgccagacacaccaccaaagccaggtgccctgggaaatagcccatgtgacacatggcaatgggaaaatgacaaaagtccacgtctcttttcaggaactagagaaagactcatcttcaaaatcaaaacgtcgtgaaagtttggtaagagttttctacacagctatgatctattttaggaacaaacaccttttcaagagaatgctttccagacaaagaagctgatagaaagggcggaaatcctcccaggataggatcacaaaggacccatataaaaaattcttaaagaaaaatgacgttaccttttctctgccagaaggatccatgctctgaggcttgtaacaatgtccgggtcaccagagtatatgttcacagtagtcttggcagacaaggaagttgcaaattatttatctatgaaaccaaaaaataatattcctaaaaatactggttacactgctaattatttaagtctatttagcaaacccattgctctttatattttctatttaggtactaacatcaaccatttacacacagctggaaatctttttgaagaattaattatctaagagaggaaaaaaggaaaatagtttcctcccacatttaagcaactagtatcttctcttcccgtctggtgaccttgagggacagaagtttccaataatctctgcaagtggccattccaggcactgacaggctcatgtgctgtgatccagtgggacatcacagaagcaaaaggcttggcccttcccgttcacacctgtcttttgtcctagatattccagataaatacaaacaggacaagatcagcgaaagacccatcaggagattacatcagtgctacaggatggctagataaatcagctttgggagtctggggccctggatgggagtccaacatgtcctaagtgtgaggccttcactggccttcactctgtctcagattcctgacctcgagaccagcttcacggtcatgcaacttgcacagtcacacacggcccgtcacttagaagtacccatctatggtggctcactcctgtaatcccagcactttgggaggctgaggtgggtggatcacctgaggtcaggagttcaagatcagcctggccaacatggtgaaaccccgtttctactaaaaacacaaaaataaattagccgggcatggtggcatgtctgtaatcccagctattcaggaggctgaggcaggagaatcgcttgaacttgcgaggcagaggttgcagtgagccaagattgtgccattgcactccagttcaggcaacaagagcgaaactctgtctcaaaaaaaaaaaaaagtacccatctaacctcatcttttcagtcaggtaatccagtggaactctgagtctatcaccaacagccattgccctcaactccttccctagtcccattaaactatcatcacatcctccttacaccagtcctgattttaagtcaacacaattagcattgatctaacacatgccctttgccaagccctggagtaaatacagaggatacaaaactaagcaagacaatgttagctgagtgcagtggctcacatctgtaatccacacattttgggaggtcaagatgacaggatcaccggagcccaggagttcaaaaccagcctgggcaacatagcaagacccatctctacaaaaaaattaaaaactaggggtgacaaaaaattttttgtcacaatgtcctgcaattgtgacatgcgcctgcaatcccagctacttagaagtccaggcaggaggatcatttgggtcctgaaggtcaaggctgcagtgagctgtgatcacaccactgtgctccagcctagacagcagggcagtaccttgtctctaaaaataaaaaataaaataaaatttaaaagacatttctcctgcctatgactagctcaggaagaaagacagacatgaaaaacaaatgggccgggtgtggtagctcacacctgtaatcccagcacttttggaggccgaggcagacagatcatgagctcaggagttcaagtccagcctgggcaacacagtgaaaccccatctctacaaaaaacacaaaaattagccaggtgtggtggcatgcaccttgtagtcccagctacttgggaggctgaagtggcaggatcacttgagcctgggagttccaggctgcagtgagccgagattgcaccactgcaatccagcctgggtgacaaagtgagaccctgtctcaaaaataaataaataaaagcaaatgactatcacatactgcagtaaccacctaaacagacatgacttaaagatattgatggcacagaggaggaaagggccaactctgctagagtgattcaaacaagcttcagaccgatagaaatggtattagccgggttattcaagagtgattataagtttgctaggcagttggggtggggtggcaggggaaaagactagcataggaaaaaccaagaaggcatgaaagggcatgtcgaggccagactcagtgcttacacctataaacgcagcactttgggaggccgaggcgggcagatcacctgaagtcaggagttcgaggccagcctggccaacatggcaaaaccccatcactacccaaaatacaaaaattagccgggcatgatggtgcacccctggagttccagctactcaggagactgaagcaagagaattgcttgaacctgggaggagcaggctgcagtgaactgagatcacgccactgcactccagcctgggcgacggagtgagactctgtttcaaaaaaacagtaaaggaaagaaaaagcatgtggagattgtcaagctggtcaggacaaacaaagcttgtgaatggtgcacatgggaaggatctgagagagtaggccctgaccacgagacttgggttctgtgctactgagcttagacttcattcaaaggcagcagcagggaagaggttccctccagatttcagttttaaaatgatcgctctgccaggcgaggtggctcacgtctgtattcccagcactttgggaggccgaggcaagtggattacctgaggtcgggagtttgagaccagcctggccaatatggtgaaaccccatctttactaaatatataaaaaaattagccaggcgtgttggcatgctccagtagtcccagctactcaagaggctgaggcaggagaatcacttgaatccaggaggtggaggttgcagtgagccaagattgtgccaccacactccagcctaggttacagacagagagactccatctcaaagaaaaaaaatataataaataaataaacaataaaaacaaaaatatcactcttgattggatggagaagagcaagaccagagagatcagtcaggagattacaacagtgctgcagagtggctagacaagtcggccctgggggtctgcagccctgaattgaacgcaggtccatcacatccttagtgtgagggcttccgaggtctgcaattcctgaccttggaaacagcttcatggacgcgtgacctgcacggtcacacacagcctggcacttcaaagggctctgttgtccgtcttaaaattcttaacaacttttaaacaagaggacccgcattttcattttatagtaggccctaaaaattatgtagctgggccaggcgcagtggctcatgcttgtaatcccagcactttgggagctgaggtaagaggattgcttgagcataggagttcaagaccagcctgagcaacatagtgagactccatctccacaaaaattaaacaaaattagctggctatggtggcgagaacctgtagtcacagctacccaggaggctgaggtgagagtatcgcttgagcccaggagacagaggttacagtgagccaagatcgtaccactgcactctagcctgggtgatgcagtgagaccctgtctcaaaaaaaaaaaaaaaagaaagaaaagaaaaggggggatgggggcaaataagtaagttgtagaattattactaaaggaaacaagaggttgaactatttgaaatcaccatttctgtagtcaaaaattgccaagtatcagcaatttcatatggctcaactcaacacttcttcaaaatgtaggtagtcattcaaaagacaacattatccaaaaacatgacagtggcaaaaagaacattactcataaaaaaaaaaaaaaaggaagtaaatttaggaatcttaaaagggcatcgtttattactcttgtgatcagagaaaaatacataaatattaattttttaagtgcaataattccagaagaaagcaaacatatcactagaatggaacaagaaaagcaataaatgaacaaacatcctcgcagaaaccatagctgaagaacatatgtatgggtaaagaaacaaatactatagtaaaaatagttttatgtttgaattacaggcatattatggcacatgtgcaataagacaaaatgacaatttattaaaacatgaattctacttgataaaaaagcaaattagtgactgggtaattcctctatttattatttattgagctaataacaaatgcacaaagaaatgagacagaaggttttaaaacctattggagccctctttgtggaactgggccaatcaggatcttgcaggcagttctcactcatgatataaaaggccctctggagcattcagatgggcttttttaaaaatatacacagctgcttgacaccaggatgccacgatggggtaggttaaatggctaccaacagatacaaagcccccagcactttttaattccttaacctttttcattctaggtctaatgatacacttagaatggatggcagtggagggatgggttttgactccctcccccacctcaagaatattagcagatgcaggagacgacaattaaggtgtcaacataaggaaaatcaaaaataaaaagtaaccaaagagtttagatgatttgggtctatcctcagagctcaatcccgtctatcagaacatttgatgcagtgatttttcctttcttcttaaaatactgtctccctgcggctgctggctcaccatactcacctggttttatttccgttttcaaggacctctacctctctgttttccttgctgaatcctcttccccttcgcggcttctaactgttggagctcccccagggctcagtctgaagacctcttgtcatcccccaatacctggcggatttcatccggacctgtggctttacatgccacctctactctgagtaccgcgcatgtatctgtccagcccctcctggcaccctgagctccacacatgcttagcaagccacggatgctgcattttcatttgcatgtgtgatatggtttggatgtgtgtctcctccaaacctcatattgaaatgtgatccctcatgttggaggtggggctgggtgggaggtgcttgggtcgcgggggtggatccctcataaatggcttggtcctatccttgctgtaatgagtgagttctcactctattagttcacattgatgtgcagacacgcaggtgccaatggattgagctgattgtttaaaggagcctggcgcctcctcccctctctcttgctccctctcttgccatgtgacacatatgcttccccttctcttccaccatgaagcttcctgaggccccaccagaagccaagcagacgctgtgccatgcttgtacagcctgcagaactgtgagcccaagaaaccactttatcaattacctagtctcagatgttcctttatagcaacacaaaatggactaatataatgcctaataggtatttcaaattccatatgattaaaacaatgctcgatgctcccaatccacttctccagtcttccccgttcactgatgagacttaacactgggagccatccatcacagcccatctccaattcatcaacaagctctatgacctctaccttcaaagcgaatcctgaatcccaccatgtatcaccatctccacaaagatcatccccttccaggcacgactgtctctcacctggatctctacaatagcttcatgaccgtcacctgctccctacttaccaccccggggttccgagaaagcagccagagttttttctttttctgtgtttttttgttttgttttgttttgttttgtttttgagatggagtctcactctgtcatccaggttggagtacagtggcgcgatctggctcactggaacctctgtctccagggttcaagcaattatcctgcctcagcctcctgggtagctgggattacaggtgtgcaccaccacgcccggctaatttttgtatttttagtagagacggggtttcaccgtgttggccaggctggtctcaaactgctaacctcaggtgatgcacccgcctcagagcctaaagtgctcggattacaggcatgagtcactgcgcccggcatcctttttataatcagatcacatcatcattctcccacagaagccctgcaatggcctcccaccacccttggaacaaaccccactacttcaagacatggtagcataaattctcataattacatcagaggatgatccggcaatgccgagtaaacctgaagattagaacaccttctggcctcgctattctttatcccggtatctccctgagaaaaacgcttgcacagattctgtacagagatgtcactgcaaaaccacttatcagagtgaaaaggtataaaacactgattgttcctcagtagagacattgatacaaaaattaagtttgttccacatggtaaaatgctggcactagtcaaaagaaataaattagatctaagcatagtgtgctagagttaatgattcctgatgtttggccgctgacagcttccaagccacatcactggccctttcccttttgcccacacccaggcaagcctataagaaagtttgtgttctttatccctttgcatgggcagggaagtctaaaccatgcacacccctgcatggagccctccccaccccacttctaaccacactaaaaagcagagcgcctccacctcccaccctcactttttcactccaaaccaaatcgaagccttcaagaaatatttgtgatgttgactatgtgagcatagtcacgcaataaattgcattccatatccattggtaattgtgtgtcagcgtaggcaccctgacatccataaattccaggaggtggaggcagggggattgcctagcgtccagcaaggaatgctaaattcctaaataatacgtataccaggccaggtgaggtggctcacacctgtaatcccagcattttgggaggctgagccagggagaatgcttgatgccaaaagttcaagaccagccagggcaacagatcacgaccccatctctacagaaattttaaaaaattagccaggcatggtggcatgcacctatagtcccagctgttcaggaggttgaggtaggaggatggcttgagcccaggagttcaaggctgctgtgagccttgatcatgccactgcactccaacctgggcaacagagcaagatcctacctcgaaaaaaaaaatatgagagttagataagcctcaaaaacataatgttgattggaaaaaaagttgtgacaggatatcgtatggtatcgtttgtgtaataatctgttctagttctaggggttctgttttgctttaaagtctattttgtctgccattaatctttccttcagtgagaatttgttttatataaccttcatcatcattgtatattcaacctttgtgtatactgagactttagatgtgcaccttgtaattggctttttttttttttttttgagacggagtctggctgtcgcccaggctggagtgcagtagcgcgatctcggctcactgcaggctccgcccccggggttcacgccattctcctgcctcagcctcccgagtagctgggactacaggcgcccaccaccttgctcggctaattttttgtatttttagtagagacggggttccactgtgttagccaggatggtctcgatctgacctcgtgatccgcccgcctcggccttccaaagtgctgggattacaggcgtgagccaccgcgcccggcctgtaattggctaattttttaaatgatgtttagaacccaatcagatgattttgtttgtttgtttttgttttttgttttttgggttttttttttgtttttttttttgagacagggtgtcactctgtcacccaggctggagtgcagtggcaagatcttggctcactgcaacctctgcctcccgggttcaagtgattctcatgcctcagccacctgagtagctggcattacaggaacccacaaccacacccagctaatttttgtatttttagtagagacggggtttcaccatgttggccaggctggtctcgaactcctgacctcaagcgattgcccgcctcagcctcccaaggtgctgggattacaggcatgagccaccatgcctgactgatttttgtttttcaactggaatatttattcacccttaactataattttgtatatagatacatttattctcactattatcctatcgatgctttttctcttcatttttgccttttggggggatctatttcctatcttctcattccattcttttcctctactagttaggcaattttagactatgttctttaagcagtaacacaaggaatttcagcatccacaactaacttatccaatgttaacttcgactatatatttaccctcctcccaaacaacacaggacttcagaccactttaaccttaattactcctgtgtcagatgtataagctattgctgttatacatttttattttatttatttatatttttttgagacagagtctcactctgttgcccaggctggagtgcagtggtgcaatctcagctcactgcaacttctacctcccaggttcaagcgattctcctgcctcagcctcccaagtagctgggattacaggcacgtgctaccacacccaggtaattttgtatttttagtagagacagggtttcaccatgttggccaggctgatctcaaactcctgacctcaggtgatccgcccacctcagcctcccgaagtgttgaaattacattaaccccaaagcccttactgttgttgtacacaggcatgtttgtctgggtttacccacatatttattattttccttattcttcctttcttcttatacttcagacttacagctgggatcattttacttttatctaaaattcattcttagatcattgctgttcaatggaaatacaacatgagctcatgtgtaactttaagttttctggtagcaaaattttaaaaaattttaaagaaacaagtcaaatcaatttttttcattgtctaaggtaaatttattttactgttttaaaacaagcatgcatttccagtttccaatatgacaagggcaggcacttaaaatacacactcaaaattaattttgagtcaggcaaaattaattttaataaaacaaaaatatcccatgccaaaagcttgactcggtgtattttttcttaattaaaacaaaagtgtctatgaattatctgtgctcaaagattactctgtcattgctaacaaattagtatgcctcaatttccaagataaaacaagaaagtgttctcttgggaaactgtcatattaacagacagctgtgtgtgaacatagcaaatgctgaattctgaaggattcaggtcaaactgacagctgacttttacttatgctaatcaatttcatgtccactctctttataggcttttaagctgtactatttactgtactgtttattgttatatgcctcatgggcagtcctcagattttcagaggaaactttctaacatcagaactcaagcttttagcccattggtgagctagagctggctagcatcaatgtgcaacaactcattgttaaatatcaggaagtttgtgagttcaaccataggttgatgcgaaagtcattgcagtttctgctattgaaagtaatagcaaagactacaatgacttttgtagccacctaaaatggtttgaaattggccatggtgggagtatttcccccacggaaccagtgaacactaccagtcagggcttttttattgattacaccactgacacactattttaaatccctccttatttgcactgctggtttcccatttcaatttttttttttttttttgagacttgtttctattgcccaagctggagtgcagtagagtaatctcagctcactgcaacgcctgcctcctgggctcaagccaacctcccacctcagcctcccaagtagctgggactacaagcatgcaccaccacgcccagctaatttttgtattatttgtagagatagggtctcactatgtcacccaagctgtcctcaaaactcttgagctcaggcgatcctcccacctcggcctcccaaaatgctaggataacaggcatgagccaccgcacctggccagtttttctttttcaatattattttggctatttagatagctcacactttctgatttcaaaactactggaaccaaaaaagtgtggtactggcatcaggacagacgtacagaccaatataacagaatagagagccgagaaataaaccgtatatgatcaactgatttccaacaagggtgccaagaccattcaatggggaaaagacaatctttttaacaaatggtgctgagaaaactggatattcacatgcagagaatgaaattagacccttaccttacaccacatacaaaaattaactccaaatggatcaaagacctctatgtgtgagctacaactataaaacccttagaaaaaaacagggaccaaaaggaagaagcaacccacatgtccatccatagatgaaaggacaaacaacatgtggtctatacatgcaatggaatattatttgggcataaagaagaatcaagttctgatacgtattttcaacatagatgaaccttaaaaacatgctgaatgaaacagggcagacatacaaggacacatactgtataattccacttatttggaatatctagaataggcaaattcatagagacagaaaaacaggggctgtggtgatgggagaatggggcagtattgcttaataggtacagagattctattgaaggtgaaaaagatgtttggaaatagtggtgatggttgcacacattgcgaatgtaatttatgccactgaattgtacacttaaaaattgttaaagtagccaggcgcaatggctcacacctgtaatcccagcactttgggaggccgagctgggtggatcacctgaggtcaggagtttgagaccagcctgagcaacatggtgaaaccctgtctctactaaaaaaatacaaaaattagccaagtgtggtggcaggtgcctgtaattccagctactcgggcggctgaggcatgagaattgcttgaacccaggaggcaaaggttgcagtgaaccaaggttgcaccactgcactccagcctgggagacaaagcgagagtgtctccaaaaaaaaaattgttacagcaataaattttatgtttatatatatatatatcatatatgtatgtatatatattcatagaatctttatgtaaaagcttatcattctttattcttaatattatttatcttgatgctcaaattctcccagatctggccagtggcaactctgccaaactggttcctgcatcctttggacgtggctatatcatctttgaagacttccttattttcttctttccttttttgcagctatatgtatatatacacatacacacacacaatatatatatataatggttctttaggctgtacaggaggcatatataacattttatatatgtacatatatatacatacttagatacatatgtacaggaggcatatataatgttatatattatatatacatatatgtgtgtatatatataaaacattttatatatgtacatatatgtatatatacttagatacatatatatgtacaggaggcttatataatgttatatataatatataaatgtgtgtatgtgtgtattattgcaaaaaaggaaagaagagcataaggaagtcctcaaagacgatatggacatgtcaaaaggacacaggaaccagtttggtggagttgccactggccagatctgggagaatttgagcatcaaaataaataacatttataataaagaatgagaagcttttacataaagtaagattcgatgaatatatactgaatgatatggtttagatctgtgtccctgcccaaatctcatgtcgaattataatctccaatgtcagaggtagggcctggtgggaggtgattggatcaaggaggtgcatttcttatgaatggtttagtgccagccccttggtgctgttcttgtaatagtgagtgagctcttgttagatctggatgtttacaaatatagcacctcttctctcactctcgctctcttgctcctgccttggaagacatgcctgctcccccttcaccttctaccatgattgtaagtttcttgaggcctccccagaagcggaagatgccagcatcatgccccctgtacagcctgtagaaccatgagccaagtaaacctctttcctttataaattgcccagtctcaggtatttccctatagcaatgtgagaagggactaatacactaatataaataaataaacagcagaaatgtatctaatacacatagaaagaatgatggaattagaaagtcaccatgtgaggggcttaacagtaacaattgattcaggcaagagtgatcagcagcctaaaatgagtaaggaaaagtttgagtaacataatatttacagagcctctatgcactccccagaagatacttaataattagaaagaatgaagttacagtggggtgtgtatgtgcatgtgtgcgggtgcatgcaggcacatgtgtgtacacagtcatgcaccacatgcaatgtttcagtcaatgatagaccacatttttaccataactttgctatgtttagatatgcttagatacataaatacttaccattatgttacagttgcctgagcattcagtacagtgccatgctgtacaggtttagagccttggagccgtaggttataccacagagcctaggtgtggagtagtctctaccacctatgtttgtgtaagcccactctctgatgttctcacaaagacaaaatcttctaatgacagattcctcagaaggcatccctttcattaagagaagatatccctagccacctacccaccaaactatccctgcaaaaccctaacccccgagccttcggggagactgatttgagtgatagcttcagtctcccacgtggccaacctcgcattaattaatttaagcaacacatgactatatatccatcaagacagagaaagagaaaagataagacaaatgtattaggcaggcacagtggctcacacctgtaatcccagcactttgggaggctgaggcaggaagattgtatgtatgtatgtatgtatgtatgtatttatgtatgtatgtatgtatattttgagacagagtctcactctgtcgccccagtctggagggcagtggcacaatctcagctcactgcagcctctacttcccggtttcaagtgattctcccgcctcagcctcctgagtagctgggattacagatgtgtgccaccatgctcagctaatttttgtatttttagtagagatgggatttcactgtattgtccaggttggtctcgaattcctgacctcaagtgatcctcccacctcagcctcccaaagtgctgggattacaggcataagccaccatgcccagccattattattattattattaatattattttgagacagagtctcgctctgtctcccaggctggagtgcagtggtgcgatctcagctcactgcaacctccacctcctgggttccagtgattctcctgcctcagcctcccaagtagctgggattacaggtgtgcaccaccatgcccggctaattttggtatttttagtagagatgggatttcaccatgttgcctggattggtcttgaagtcctgacctcaagtgatcctcccacctcagcctcccaaagtgctgggattacaggcaacagccaccatgcccagccaaaaatgtatttaaaaaaaaattagttgggtttgatggcatacaccggtggtcccagctacttgagtggctgagcagtaaagcatattggagatttttttgtattaatcttacaacttttctgtaagtctgaaattatgccaaaatgaaaagctcaaaataaaagataaacttcaaataaagacattttagataaacaaagatggcgagatttcaggatcagcagacttgaaccaatgaacatgttaaagtacatattttaagcagaaagaaaatgattccacatggaatgtcagagatacaagaaggggtgaagaggaaagaaagtgttgagcaggtcatcagtgtaaatgaacaccaacttcataaagtacagcaagtcctcaaatcatgttgtttcattataatgatgagaaaaaaaatcactttccagtctacacatcctccccttacctgtgtgggttttctccgggtcctctggtttcctcctgcattccaaagatgtgcatgttaggttgattggcatgtgtacaacgtcccagtctgagtgagtgtgaaaccacctttgcaaagatgatggcagtgagagaagcctaacatagctgactccatcttgcctccagcctcacaggctggctgtccttgctcattcctgggcagaagccaggctaaccacgggaggaatttatttgtagtttaactttaaagcaaggatgaaaatagcccttcccaaaactaaactgccctataaaactaatgaaagaccacaatgttaggattccgggaggagcccaaattctgctaagatgtaggcatacttaaacaatagccagccattgttttggaggtcacaagatttgtgcaagatttcataagatttgagtgacttcctcaattactcctatagataagatcactattgtagaacctaaggttggcctttccagatgattttttggactttcacatttctgacgactggctgactccacccagatggggactcatgactcaactggtcctgtggtccccattcagaggtggactcagcacacgaggacagttttccacacccctatgatttcatccccaaccaatcaacattccccattccttagacccctgcccaccaaactatacatgaaaaaccctaatctctgagcctttggggagactgatctgagtgataactcccattctccttttggctggtcttaggttaattaaattctttctttactgcaataccatggtctcagtgaactggttttttctttgcagggggcaggaaaaacgcacagggcgatcacaagtatgggtgtgtgtgtgagcgtgccccccagcaggagggcatcttgtccggggctggttcctatcttatgtcctgagctgctgggataggccccagccactgaaaccctgaactggaataactgggtaaatgttatcttacttgtttttattaatctttctcaaatgtatgtatagctcacatttatttccatgtttaatattaagagtattttggtctttatttagaagttctgttatatttttgtgaccagaaatatgccataggaacttaactcttgcttagatcaattagcctatggtaaaattagtttcattatacatcatttcacttaagatagaagtttccaagaatctattgaagactttaagtagggaattaccataattataaaaatgcctctgggggatttaaatatatataaagtaagacagacaataataatagcatgtaagtcataatgggaaataaatgtagttaatgtgctggaaggtaaatatattgttcaggtggatagtaaaggatttgactaacattatattttcataaattttcaaataatttagacttctagggtaaccactacaggggagcagaggagggtgataaaaatcatttttaaaaaatccattcaaaagaagtcaagagaaaataaaaaaaatccaaaagaagagaagaaggaaaatgagacataggaatcttcactctacaacttcccaggtgattcattcatataccaacccatcgtgatgaattcaagaaatgtgctacaattctgttgttactagtaatacccgtaactgtaatgctaatagtagctgtagctgtaataggtccattgtccaatgcacccagcaagtcaatacacagagacatcaggttgcagcagagaaaaaggtttaatggtaaggtcacaaaatgaggagatgggaggaaacctcaaatccatctccctgaggaatttggggttagggttttggagcaggctaaagtgtgcaaattgttggtggatggaagagtgcagggtgaactcctactgcagggagaggaagaagctgtgttctcatgcttatcccaatcctttgtgaggtcttcaaattggttgctagaatttcgggtctgaaaaacatcttaagccatccttaacaaaagccttatgagtctaatgtcagagatcctgtctataggagcaatggggtgccaatgatcaggatctagcaccacatgactttcagctacaaggaagtgggccaaagtgcagcctgattgatgcttaattataactatacttctgtccataaccagacatgcaattcttgccacccctgtgaggatggtgatatggtttggctctgtgtccccacccaaatctcatggctaattgtaatccccatgtgttgaaggtgggacctggtgggaggtgactggatcatgggggtggtttctaatggtttagcaccatctcctagtgctgtcttgtgatagcactctcacgagatctggttatttaaaagggcgtggcaactcccccatcaagctctctctctctctcctgcctccatgtgaagaaggttctcgcttcccctttgcctcctgccatgattgtaagtttcctgaggcctcccagccatgcttcctggtaagccagcagaactgtgagccaattaaacctcttttcttcataaattacccagtctcgggtagctcttcatagcagtgtgagaacagactaatacagatggtttaaataatttctcagaaatgttactaaatcgtatcagtccatttcaagccaatagaagaagttcctgccttcaaatccaaatccatctcattcataaacagcatattttaatctatctgtttttgaaatctccctcttattcaattaatttccctggcctctctgatataaacacagcagaatgtccacaaagcatagattcaaagtaatacttcatttctcacccaaaaacatacaaaaaataaaaagtttgcagtgtgatttgttgtgtcttcttttttttttttttttttaatttatttttttattgataattcttgggtgtttctcacagagggggatttggcagggtcatgggacattagtggagggaaggtcagcagataaacaagtgaacaaaggtctctggttttcctaggcagaggaccctgcggccttccgcagtgtttgtgtccctgattacttgagattagggattggtgatgactcttaacgagcatgctgccttcaagcatctgtttaacaaagcacatcttgcaccgcccttaatccatttaaccctgagtggacacagcacatgtttcagagagcacagggttgggggtaaggtcacagatcaacaggatcccaaggcagaggaatttttcttagtgcagaacaaaatgaaaagtctcccatgtctacttctttctacacagacacggcaaccatccgatttctcaatcttttccccacctttcccacctttctattccacaaagccgccattgtcatcctggcccgttctcaatgagctgttgggcacacctcccagacggggtggtggccgggcagaggggctcctcacttcccagtaggggcggccgggcagaggcgcccctcacctcccggacgaggcggctggccgggcaggggggctgacccccccccacctccctcccggacggggcggctggccgggcggggggccgacacccccacctccctcccggacggggcggctggccgggcggggggccgacccccccacctccctcccggacggggcggctggccgggcggggggctgacccccccacctccctcccggacggggcggctggccgggctgaggggctcctcacttcccagtaggggcggccgggcagaggcgcccctcacctcccggacggggcggctggccaggcggggggctgacccccccacctccctcccggacggcacggctggccaggcggggggctgacccccccacctccctcccggatggcacggctggccgggtggggggctgaccccccccacctccctcccggacggcacggctggccaggcggggggctgacccccccacctccctcccggatggcacggctggccaggcggggggctgacccccccacctccctcccggatggcacggctggccaggcggggggctgacccccccacctccctcccggatggggcggctggccgggtggggggctgaccccccccacctccctcccggacggggtggctgccgggcggagacgctcctcacttcccagatggggtggctgctgggcggagaggctcctcacttctcagacggggcagctgccgggcggaggggctcctcacttctcagacggggtggttgccaggcagagggtctcctcacttctcagatggggcagctgggcagagacgctcctcacctcccagacggggtctcggccgggcagaggcgctcctcacatcccagatggggcggcggggcagaggcgctccccacatctcagacgatgggcggccgggcagagacgctcctcacttcctagatgtgatggcggctgggaagaggcgctcctcacttcctagatgggatggcggccgggcggagacgctcctcactttccagactgggcagccaggcagaggggctcctcacatcccagacgatgggcggccaggcagagacactcctcacttcccagacggggtggcggccgggcagaggctgcaatctcggcactttgggaggccaaggcaggcggctgggaggtgtaggttgtagtgagccgagatcacgccactgcactccagcctgggcaccattgagcactgagtgaacgagactctgtctgcaaacccggcacctcaggaggccgaggttggcggatcactcgcggttaggggctggagactggcccggccaacacagcgaaaccccgtctccaccaaaaccagtcaggcgtggcggcgcgtgcctgcaatcgcaggcactcggcaggctgaggcaggagaatcaggcagggaggttgcagtgagccgagatggcagcagtacagtccagcttcggctccgcatgagagggagacggtggggagagcgagagggagagggagagggagagggagagggagagggagacggagagggagagggagagggactgtgtcttctaataatatgcaacataacaacaaaaaaaaagcccaactagcagaatttaatgttacccaataaatgggtaatctaatggcaatttaatgttacccattccttacactttttttttttcttttgagacagggtcccactctgtcacccagactgcagtgcagtggcacaatcacagctcactgcagccttgacctcctaggctcaagtgatcctcccgcctcagcctgtcgagtagctgggactacaggtgtgtgccaccatgcctggctaatttttgtatttttttaataaagacagggtttcatcatgttgctcaggctggtctcaaactcctgggctcaagcaatccatcggcctcaggctcctaaagtgctgggattacaggcatgagccactgcacccggccattccttacactttaagtgaaatcttttagctcattgaaacagcaaattgaagttaccccttaaaaaaccacaaaacagttgagatcacttgctgctaatcctgatgtttggcctagaataggtgatcaattcccaatttaaaagtacaggcaaataattaataaagaaatttaaaaactacaggctgtgtaatgaatttaactacagcaagacactgacctcaagggcagtattattgtaactatttttaagaattacaacacagagctcattatgtgtcagtcacatttcaacttacaaaatagctaacaatggatttgacattaactttataataaatttaatcatcatccctacagacaaggatctaattttactgcatgtaaagggaaaatatacattgccattctcctaaagacctgatgagttatgagtcttaaatttaaatttgttttagaaaatcatgtctcattgctcccatacacttgtgccagatgaagtgaatagcaaattattccccaaaggacatggacagacaaagacagacagacagacacgcataaactcacacagacactcctttacagccatgacaaatatagctgcattgttaaaatgtcaccaatttttttttttttttttgagacagagtctcactctgtcacccaggctggagtgcagtggcatgatcttggctcactgcaacctctgtctcttgggtgcaagtaattctcctacctcaacctcccaagtacctgggattacaggcgcccaccatcacacccagctaatttttgcatttttagtagagacagggtttcaccacgttggccaggctggtctcgaactcctgacctcaggtgattggcccgcctcagcctcccaaagtgccgggattacaggggtgagccactgcacctggccaatgataccaatcttttaaggctccaccttcaatgctccctggtccacaatttctcaaactagatgctttcactgataagttttctggcattctctttattctacatttgttccttgagctcctgagaacaggaaccagattttacttcacattgggtcgtgccatgccttcccaacactgacagtttggaaaaagcagattctcaacagattactattggggaccctttaagccaatgtgccaattcatcaaattagtttggtttttctacccaagcagaactcacacttctacaatatatgtttcttcactaaagaataaagagccggttaagagaattcatttctttggccctaaaagcaggcacaatgataacttaaactgttaagagaaataaatccacagccctaagccttgctgttcctattataagagctaaaaacctaagctgtcgccctcagtacctgccaaagcttccaactgggccctgatttgtgaagagcaaaggccttacaggcgtcttgtgtggaagtcaccaggtcttccctaccagcggggagaaatatctaagccagccatccatggctgggtgtttaaatgataaagaaaaaaaaaaaagaagaacattttgaaaaaatcaagtgaccaaaacttgagagaatattatgagaatatcaaacacaatggagctattttaaaagaaagcagaaatctggaataatgaaatcggcaagaagaaaacactaagagcaaaaatacatttatacataagacaactatttttcaaaattcttgctcggctttggatgttctgtttgcctcccagctacaaacacattcttcacacacgctgggaatgctgctgaaaactagtcagcattcagaggcttaatccacagtcccggcgctgtgcctgtgggcttcatcgtcagacagccatttgtcctcaggagaggttaggggttgaaatgcaaatatgcaaacaactgagttcttgccctaaaatagctgagaaaagcatgatcccttatgctatcttttaaaaatggaaaaagaagaaaaaaagcttacaatcttaaggatttgtttaaataccttagtatgttgcaattttgaaggagaaaatgatggaaaggaagaaacacacttgtcctgggtaaaatctataatctggagaaaaggttgacatacgtgtgacacttgatttaccagacccactaaagatttattgatttatcaatcactgcctcaggcacttgatttcccccaagggagaattaacaattcccgccaactgatggattctattgtgaactaaaatgaatgcaagaatctatcctctccctgtgcacaacctccaattaccaaacaaacaaaaaaaaagtgtatctctctgtttggggaatccttaaaatccttaaaattaaaaattatttaacaaaagaaatactgtattaagtaattgtcactgggccgggcgcagtggctcacgcctgtaatcccagcacttggggaggctgaggcgatggatcacctgaggtcaagagttcgagaccagtcaggccagccaggcaaaaccatgtctctactaaaaatacaataattagctgggcatggtggcgggtgcctataatcccagctactcaggtggctaaggcaggagaaccacttaaacccaggaggcagaggttgcagtgagctgaagttgtgccactgcactccagtctgggcaacaaagcgagactccatctcaagaaaaaaaaatcacccttgatgccaatagacatttttaaaggatgactttaacaagctctaaaggagatacgggcatcacagaaatgtgatttcataacgtggataggaacatgatcttttatgttaaattaccaggattgactgtagcctccaccacttacgagatgtgttatcttgggcttctttaagcctcagtttcaccatctataaaatgaggagatacacttgtccttaggaaaatgagtagtgaggatgaatagaatgcatctggcctagcctctgacatgcagtcagccttccatctggcagttccattcccattactgtcactctaaaatcatatgaagtataacactatggaaggccacacagacaggctccagggctgaaacagttcacagagtatgacaaagcgcccttaacgcttttgcaaggctccttcagtgtcaactaagtgacagcttgaaaagatgtacttattaactaatatatggattaagctttctttaatattacccactaatcagaaaatctaaatctatcagaagattctaaagcaaatatgagtaaactatagcctgggtgtcaaatctgttctaccacctatttttgtaaataaaatattattgaaagtgtaggggcagaaagggggtaatcccctgtaacaaaaggcaggttaacaatagaaaagtataacaaattttttacatgcacacttatgcagggatgtcacagaaaatatgaaaactcaaagagcccagtgagtgattattattattattatttttatttttagacaggatctcactctattgcccaggctggagtgtagtggtgccatctaggctcactgcagcctcgctctcctggactccagcaatcctcctcccacctcagcctccagagtagctgggactacaggcatgtgccaccacgcctggataatttttgttgttgttgcagagatggagttttgccatgttgccaaggctggtcttgaactcctgagctcaagtgatccacctgccttgacctcccaaagtgctgggattacaggagtgagccacagttgagtggaatttttatgctatcctgaggctacagaaagaataaggggcttggggcttccagaagaggtagcacacaggttatgggaaaaggaaagaaggaaaatttgtcaaagtggtcttgtcatgcaaatgaagcatcacaggtagcagctctcagaaagaatagaagtggactgtggcaaagtttctctgacaaacctttaaacgtgttaggctcttagtctctttttcctgtgagctcatctttcctagatctggagaagagggtgctcagagaaagcctggctgcttatttcactaatgtagattttctctacagatgcaaatctcctccaccaaagacagcttttcagggctattcttgtctgcagtttctctgaataattatctcaaaatatgccaaagaagtctatttttggggtgaaatattctggtttccttcagaacacattcctatattgtttatggctgtttgggtcctacaatgacagagttgagtagctgtgaccgaagccatatggcccactgttctccccacagtgagtggtgagggatggtgagggacaggaggctttatgcagacctcaggagaaacttttgaaaggattgactcttaccattttgttgctgacagttccctggggtgagaacacagcaacgccctgcagggccaccccaaggaagcaagcaccagagacggcagcagggaaggaaagggttaggcaggacaagcaggtttaggattggccaattttcatgatttcagcaagctctggggcttaggagctatccctatcagatatcagatatctggctctgggcaattagggcaggtgcatagtggcctaaagcatgagaggtgaggcagtttggggtgtagactttgtttgtttgtttatgtgtgacaggatctccctctatcaccgaggctggaacgcagtgacacaatcttggctccctgtaacctcaaccttccagagtcaggtggtcctcccacctcagcctcccaagtagttgggactacaggcatgcaccatcacacccagctaatttccttgtattttttgtagagacagggtttcgctatgttgcccgggctggtgttgacctcctaggctcaagcaatctgcctgcctcagtctcccaaagtgccaggattacaggcgtgagccacggtgcccagccaagaagtatgacttaaccagctgcctaagaaggggatgtgaccagcctctagccaaggtctcaaaactgtgtcaaggcagcatttttttaaaaacatatttcacccgcgaagccaaaattgtttactgtttgctgacccatggtccataaacgaagtctagatatctggttccagttggaagtcacaacccacatcttaaatgtgctttccacaaatgtttatggtgataactcaccacaaatgtttatggagataactcagggaatataaaataggttaaattttcccacattgagaatgaatgaaacatgtcctagaagtcacggggtcggttctcagccccagtctcagtcctgcaggtcatggcaagccccacaactcagtggcagttcccaacaggccaggggtgagcagagtctatactgtggatgtcaccatggcaatggagcccagtggtccgaagtcagacaagcccatgttcaaatgttagttctaccacttatcaacagcatgatcttgagcaagttacctatattggttatctgctgatgcataacacactatgccaaaacctagtagcttaaataattgtcatttaacatctcctgcaatgtctaaggatcaggaatcctggggcagcttagctgggtggcttgggctcagagtctctcagaaggttgtagtcaaggtgccagccagggctaccaccaaccatctgaaggctcaaatggggttaaagaatccacttccaagttcatgcatgggtagttagcaggtgatagggtttggctgtgtccccacccaaatctcatcttgaattgtagctcccataatccccacgtgttgtgggagggacacagtgggaggtaattgaatcatagaggtgggtctttcccttgctgttctcatggtggtgaataagtcacatgagatctgatggttttataaacaggagttcccctgcacaagctctctcttgcctgccgccatgtaagacatgccttgcttcccctttgccctctgccatgattgtgaggcctccccagccatgtgaaactgtgagtcaattaaacttctttccttcataaattacccagtcttgcgtatgtctttattagcagcatgagaacagactaatacagcaggtctcaatgcctcactggctgttaggcagaggtctctgtttcttatcccatgggtcactccatgggctgcttgagtatgctctcaatatggcagctgacattccataggacaagtgatctgagggagagagagagagagcacgcaagacaagacagtgctcaagaaggaagccagtcttttatgcctaatctcataagaaggacagcctcacttctgctgtatgtaattggtcccacaggttaaccctggtacaagatgggaggggactacatgagtatgtgaataccaggaggtggggatcattgtggggggctggctgtgcattacctttatttaagcttcaggtcaggctgggtgcagtggctcatgtctgtaatcccagcactttgggaggtcaaggcaggcagattgcttaagcccaggagtttggaccagcctggcaacatagtgagaccctgcccagaaaaagaaaaaaagctttaggtctaccatttatgaagttagaatgataatgataatagtacctggtttataaggtttaaatgagaaagtgctggccgggcgtggtggctcacacctgtaatcccagcactttgggaggccaaggcaggcagatcatgaggtcaggagatcaagaccatcctggttaacacggtgaaaccccgtctctactaaaaatacaaaaaattagccgggcgtggtggcgggtgcctgtagtcccagctactcgggaggctgaggcaggagaatggcatgaacccgagaggtggagcttgcagtgagctgagatcgcgccactgcactccagcctgggtgacagagcaagactctgtcacaaaaaataaataaataaataaataaataaataaataaataaataagaaagtgcagtcaagcccactcacagggcttggcactcagtgaagcattctgtaaatgcttgcaattattatctacctcactgtggccactcctgccactaccacttccataataataacaaaagggtaaggggaacccttccgcatcacagggaagtttcctgtccttggccacttctgggtgagctctctttccgctttacaagggcaaccgtaactgtctgaaaaaataaacctccaacaaattcaaactagtctctttttctctcaccttgacctaaaatctttgaaacagacacccacataactcctctagaaaggcaaacccaaaaattgtcagagtaaaaaattcaatgacttaagataaaggggattatttccttagaaataaactcatttaagaaattgtagaaacttcagacatatcaatttcaatattcaaggacatcactcattcaacaaatatttactgggcatgtgttatacatcaggcatggctctaggagctgtataaacaacctggaatttaacagatgaaatctctgcccttagaaatttgcaggctagtgggaaataaacaaataggttttaaaaaaataaaaaatagagtatgttagctggtattgagttagaagctggtaatgagttagataaaaaataaataaaggccaggcaggctgctcactcctgtaatcccagcactttgagaggccaaggcaggtagattgcttgagctcaggagctggagaccagcctgggcaatatggcgaaatcctgtctctacaaataaataaataaactaattaagtaattaattaaagatggaaagtggatgggatgatgttaaaattatcaatagatgatcaaaaaaagtttcactgtcatttgcacaaaatccaaaaggaggtgacaagatgagccatgaggatatgtcctgaaagggtcaagtgcttggccttcagagaagagcaagtaggccaatgtgtctggagtccaataaggctagggtagaaatggtggcagagaaagttagagaagtagattgggggatgcagaatcaagcgcagtcttgtaggctgttgtaaggacttggactgggtccttacaacaaagaggcaccattggcaaaagaggcaccattgggttttgagcagaaatgtgacataatgtgatttacgttctaaaagcattactcttagacaactaaggggagtgaggacagaggcagagagagccatcaggaggccactatgaaaatccaagtgaggaatcatggcagcttgaaaaggatggcaagacagaagttgtgaaccttggtcaggttctggatttgagtgggagagtccagagtctgttaatgaagtctatgtgagctgtgtggtaaagagaagagtcgcgaatagctttgaattttttgtttgcttgtttgttttttgagacagtcttgctctttcttctaggctgtagtgcaatggcataatcacggttcactgcagcctcgacctccctggctcaagcagtcctcccaccttaacctcccaggtagctgagactacaggcatgtgccaccacgcctggctaatttttattttttgtattttttgtggagacagagcttcactgtgctgcccaggctgatatcgaactcctgggctcaagcgatcctctgaccttggcctcccaaagtgctggagttgcagatgtgagctgccacacccggctgctttgaagtttttgacctgagcagcttaaagaatgcagttgccatgtacagagatataaagaggtatggaaagagcaatgtggttgcctcaggagtacagtgtgggacatactgagtttgagataagataaccgtgggacatccaagtgggatgtaaggagacaagtgatagacaagtctggagctcaggggagaagtctgaacaggggatataaagttgaagtttccatgatttgagaagatatttccatcattagaaatgatagttaaagtcttgaggctaggagtaagtgcagacagagaaaagacctaagatctaagccctggggcactccagcatttagaattgggagaaatatggccggtcacagtggctcacacctgtaatcccaacactttgggaggtcagggtgggcagagcacttgaggtcaggagttcgagaccagcctggccaacatggtgaaacccagcctctgctaaaaaatacaaaaaagttagctgagcatggtgacacgtgcctgtaatcccagctacttgggaggttgaggcaggaggatcacttgaacccgggaggcggaggtcacagtgagcccatatcatgccactgccctccagcctgggcaacagagcgagactccatctcaaaaaaataagtaagtaaaatatagttggggagaataaagagaaaacagcaaaggactctgagcagtgaccagtaaagtcgaaggaaacccaagagagtggcatgtgtaaagccaagtggagaaatgttctccagaagggagtgacgagctgtgtccgatgctgttggggtgtcaagtaccatgagcaagtgaactgaacaggtgcagggaggtcactggtgaccttgatatgagaggtattggaggagtggtggaggtgacgccccactggaatgggaggagaactggagacagtgaagatggataactcaaggatttgggccataaacaaagcagagaaatggatggtaattggagaacatggtgcaatgaaaggaattcactcatgatccacataagctaatgggaatattccagtagagaaggaaatatccgttgatggtgcaggaaagaaaagagggaattgcttcagtgggtccttgagaaggcaagaggggaaaggatctggcgcctggtcaggggcgggcctcagacaagagccagaaagtccatctacagtaacaggagcagcgtgcctgggcacaaaggcaggaacatggatagatgtgtcccaccatgctccggccctccctgctgcactgctgatcaggcaggttgtaattaccaccctgtgtgtctgcctgtgtctccaagacctatgagagagaaagaccatgtaggtcaacatcgcactttcagtgcccaggacaaagcctggtgcagagcaagcactcaacaagtatggtgaatggctccttgcaaaacgagacaatatcgatcttacctggcagatattaaaaaatcataaaggtagaaattgtaatgcaatgtggcaatggcacaagacaaaacagacagatcaatggaacagaatttaaaaactaaaaaacgccgggtgcagtggctcacgcctgtaatcccagcactttgggaggccgaggtgggtggatcagttgaggtcaggagttcgagaccagcctggccaacatggtgaaaccccgtctctactaaaaatacaaaaattagctgggcatggtggcacatgcctgtaatcccagctacacgggaagctgaggcaggagaatcacttggacccagaaggtggaggttgcagtgagctgagatcacaccactgcactccagcctgagagacagcgtgagactgtctcaaaaaaaataaaaaataaaaatctggcccggcacagtgggtcatgcctgtaatcccaacactttgggaagctgaggcaggaggattgcttgagcccagaaggtggaggctgcagtgagccgtgattatgccactgcattccaccgtgggcgacagagtgagaccccgccaataagcagtaatggcataaaatgcttaacaaatgctgtcaatacaacctgatacaataatacaaatattcaggaaaaataatgtttgctatgtcatatgacacacaaaaatgaatcaccagccgggcatggtggctcacgcctgtaatcccaccaatttgggaggccgaggatcacttaagggcaagagttcaagaccagcctggtcaacatggtgaaacccccacccccaacccatctgtactaaaaatacaaaaattagctggatgtggtggtgggattacaggcatgagccaccacgcccaaccagaaagtggtttcttgagatggaatctgctcctggtgaagatgctatgaacattgttgaaatgacggcaaaggatttcaaatattccataaacatagttgataaaaaggtggtagtgtttgagaggatcaactctaactttgaaagaagcactatatgcaatgatatcacacagcactgcatgctacagagaaatattttgtgaagaagcccatcggtgtggcaaattttattgtcttattttaagaaattgtcaccccagccttgcaacaactgccctgatcagtcagcaaccatcaatatcaaggcacgaccctccaccagcaaaaagattatgactcgcagaaggctcagagagatggttagcattttctagcaataaagtatttttacttatttttttaatcatgccatattattttaaattacatacgaagatctaacatgtcacccacagaccatttcatccactgctctgtttggctgcagtctcttgtctctcccttcagcaatggtgaagcggataccctttcctcggggaagagaaatacatggtttgttgcccttgtcaataacaaaaatgatggaaaagctgttgctgttggcatctttcacgtgaatcgtgtcaaaagatccagggtgcctctctctattggtgatcacaccaattcttccccagttagcacctccagtcaccaaacacaggttaccagtgtcgaacttcaaagcagtgatgttgccagtctccaaatcaatctgaatggtgtcgttcactttaatgagggaatcagggtggcggatagtgtgagcatcgtgaatcaccaggtgaggggttccttttgtgcacacaaagatttttctcattttgcataacttgtacttgacttcctcaggtgtaacacgatgtacagcaaagcgacaattgatgccatagatcagacggaaaccctctcccgtcttgtcaatgctgatgacatccataaatccagtagggtaggttatatcagttcgaaccttgccatctaccttaatgaaccactgcatgcaaatcttcttcacttcatctcctgtcagggcatatttaagtctgttcctcaggaaaatatgagggagacactctctcagcttttggggaccagtggatggacgagcagcaaacacaccagtcaatttatccagcatccaacgttgtggagctgctacccgcttcagatgctgcttgggaccggaagccacagctgtaataggcacagaaagaggacctcccatcttctatgcacatagaaactgggaaccaataaagtatttttacattaaggtatgtaggccaggtgtggtgcctcacgcctgtaaccccagcactttgggaggccaagacgggtggattacttgaggccaggagtttgaaaccagcctggccaacaaggcgaaaccccatctctactaaaaatacaaaaattagccgggcatggtggtgcacgcctgtagtcccagctacccgggaggctgagggtggaaaattgcttgaatctgggaggcggaggttgcagtgagccaaaatcacaccactgccttccagcctgggcaacagagagagactccatcacaaaaaaaaaaaaaaaaagaataaacatatgaaagaaagtttagctattgtattagtctattctcatactgttataaagaaatacctgagactgggtaatttataaagaaaagaggtttaattggctcacagttctgcaggctgtacaggaagcatagcagcctctgcttctggggaggcctcaggaagcttccagtcatggcagaaggcaaagggggatggaggcatctcacatcgtggcaacaggagcaagagggaggtgggggaggtgccacacactttaaacaacaaaatctctccagaactcactatcatgaggacagtaccaagaggaaacccatccacatgagccaatcacctcctaccaaggccccacctcgaacactcgtgattacaattcaacatgagatttgggtggtgacacagatccaaaccatatcagctatagtaataataaaattgcaaattcaaataacttgattcaagtcttgcaatgcccccttctcaattaggcttaccttggtttctctaattaaaactgcaacccttggccaggcacaggggctcacacctgtaaccccagcacttgggtaggccaaggcaggaggatcacttgaacccaggagttcgagaccagcctgggcaacatggtgaaaccctgtctctacaaaaaaaatacgtctgggcttggtgtcatgggcctgtagtcccagctacttaggaggctgaggcaggaggatcacttgagcctgggagatgaaggttgcagtgagctgagatcatgccactgcactccagcctaggtgacagagcaagaccctttctcaaaaaataaaaataaaaatgaaaactgcaatccttggccaggtgtagtgtctcacaccgttaaccccagcattttgggtggctgaggcaggaagactgcttgagcctaggagttagagaccagcctgggcaacacagggagatgtcacctctacaataaatttaaaattaaaaaactacaatcttctccactccctactcctttaacttgctctgttttttttttaactatagcactttttgctttctaaaatgctaaaggatttacttatttataacatttatcatgtatgtacatgtcctccactcaaatataagtttcatgagatcagaggttgtttttttcaataatctatcccaagcactgagaatatgcctagtacatggttagtaatcaatatctatgtgttgaatgaatgcagcagattgacaaaataataatacccacggtaggcaagagtgtgaatagtcagactcatgtactgttaacaagagagtaaactgattaaatgaactatatacattcatactcgaacatactaaacaaccattgaaagtgatattgtgcagtgtggcaaaatacaattacactctgttccccaggctggagtgcagtggcgcaatcactgccccccaccgtctggacctcctgggctcaagtgatcctcccacatcagcctcctgaatagctgggactacaggagcaagccaccatgcattgttaatttctttttttttttttcattttgtagagatggggcctcactaggttgcccaggctggtcttgaatttagaactttttagtaaagttcccatcacattatcatgggaataatacaaattataaaatagcatgtacaatctgtttccaaggaaaaagtgtgtacaacaaaatcttatctatgaggtgagattacaagttgttgtttttgttgctgttgtaagacagaggctcgctctgtcgctcaggccagaatacagtggcaccatcctagctcactacagcctcgaattcctgggctcaagcaatcctcctgcctcagcctcctgaggagctggaactacaggtgtgcgccactgtgcccagctaatttttttttattttttgtagagacagggtcttgctatgttgcccaggctggtcccaaactcctgggctcaagcaatcctcccacctcagcttcccaaagtgccgggtttacaggtgtgagccactgcatctgccctgccacatttattttctacaatgaatatgtgttagatgtatagcaagcaagggaaacattttttaaaaggagaaaatagaaactacccggttaatacgcataggctttcctgttttaacaaggatatcggaagagtaagaacatattttagaagattcactctgcagttacattaaatggaaaccagcaagcaaagagaaatgggtaaccaaatgtaggctatttaaatgtcctctctattgtctgtagtttttaaactgcaaaaagtaaaagtgtgtatgaaataaattgtatgaaagtttctggatttaaaaagcccattctcttctcaggaagacccggatatccttctggaaagaaattcacgaattctgaccatccttgaagccaaactcaagcccgctggcctcacacgaatctgcctgttactccttaataagacaggacttcctttgggcttgggctgggatcaaatggtgctgtgtgaaagccacccattcctgccaatcacacaacccctgtaaacagcacggcttattgtgaaaattaattcagggagcttaaactccaccgaacagaagggtttaaaaagaaaagaaaaaaaattcccgtggtttagaaaatactagatgcattatgaccttcggtatgagtcccaggctatgtgcattataccggcaacacccgggaaaacataagctgtcttttttaatccatcagataattacaccgactacaaggacattttggcaactactagaaaatactgccctctggtgttaaggtcattccacactgattaacacaacaaaaaggaaaaaaagaaaagcctttcttaaatacaaaaaccactaccttcagggacttatgtttttgacttgcaaaaaatctgaacacaaaatcccaaaggattttacgggtatatattgtggacaccttccccactgtgcccggaaaatacctactaatgttattacaagctgtctcagtcaattcatgtcagaggatctcctctccaagagctatattcagctgtctcttgaacaaaacaaaaccaaaaagtattttcaagagcttctgtgggggagaagtttctggaaaataaactaaagattattttcacagaaaattttctactaatcctggtaggaagaatagaaagaagagcaatattacgatattttatatattatagaagtctttaaaaatgtgagacaatttttatgaaaaacaaaatagccacattaataaagaagctggcaatcattggctttatattgatcatcttattcctgcttaaaggtacttcaagaataagatagaaaggaggttctgtcgtagctctccgctataagaaaataaaactttaaaagggtggggcgtgccgttctgatggttacacacacaagaattgcatgcacaaattcagcagtcttggctgggcatggtggttcacacttgtaatctcagcgctttcaagccaaagccaccatgcccagcctttttttttttttttttttttcagatgggatctcattccgtttcccaggctggaacgcagtggcgcaatcttggctcactgaaacctccacctcctgggctcaagcgattctcccacttcagtctccctagtagctgggactacaggtgcccaccaccattcctagctaattgttttttgtatttttggtagagatggggtttcaccatgttgcccagactagtctcgaactcctgagctcaagtgatctgcccgccttggcctcccaaagtgttgggattacaggcgtgaagccaccatgcccagcccatgatcttttgtagagatggagcctcaccgtgttgccaataaaagaaaccaaagttccatggagaaatgaccgattctaagactggggcaggaaatacacaggataagccaggagcacctactagtaccagaaagtaggaaagtgctcaaaacaaacaaaccaaaaaaaagcccacatcagtggggagacgtcaaagggtcacaggatccaactgaaagagatcccaatagtcaaaactggaacaacttgagtaacaaaataaaatagattggatcataacccaaagcatggaataaacacccatgagtccacactgatattaatgattgaataaataaatgcagttctccttccgcatccactgcaaattggttccgggacccccatagataccaaaatccatggatgctcaagtcctttatataaaatggtatcgtatttgcacataaccaggacacatccctctgtacactctaattatatttagattacttataatacctaatacaatagaaatgctaggtaaatagctgttctgtgttgcttgttttatttggtttttgttttggtttggtttggttttggtttttttgtttttttgttttttgttttttgtttttgagatggagtttcgctcttgtcacccaggctggagtacagtggtgccgtcttggctcactgcaacctctgcctcctgggtttaagcgattctccagcctcagcctcctgagtagttgggatttcaggcacccaccaccacgcctggctaattttatatttttagtagagatggggtttcaccatgttggccaggctggtctcaaactcctgaccccaggtgatccacccgcctcgaccttccaaagtgctgggattacaggcgtgagccagtgtccccggccagtttgtatgaatttttactgggtttctttccctaatattttttatctgtggttggctgaatccacgatgtgggatcagagaatacagagggctgagtgtagaagggggagaagagacacgtcttccatgcggaagaagttcaatgaattctcacagatactccacccccacagaggtggagcataactcctcactcctgaagtgtggcctgcatgtagtgacttccttccaaaaatgggagaagagtaactttacagtagagaaacctgaccaacactatctctggcaggtgattaaggtcaatgccaacagtgataagtcatattgatagtacggtcatgcactacatcatgacatgagttatatcattataatcatggtgagttgtataattacttcatcatatattacaatgtaatcataatagaaataaacagcacaataaatataaagtgcttgaatcatccccaaaccatccctcaacccccaccctagtccatagaaaaattgtcttctggtccagcgtggctcacacctgttatcccagtactttgggaggccaaggtgggtggatcacttgaggccaggagttcaagaccagcctggccaatatggcgaaacccctcctctattaaaaatacaaaaattagctggacatagtggcgcacacctgttatcccagctgctcgggagtctgaggcacaagaattacttgaacctgggaggcagaggttacagtgagccaagatctgccactgcactccagcccgggtgacagagtgacactctgtctcaaaaaaaaatagaaagaaagaaaaatcatcttcaatgaaaccggtccctggtaccaaaaaggttggggacttctgtgttaagggatctgcttcattgaaagcgatgaaactaacaaaaattcatggaagttctctatcagatgcagagaaacttctaatgacctggattgaagaccaaacacagacacatatccctctcagcaccgtgacaatcaccaccaaagcaatgtcggtttgcaaggttgaaagcaaaggctggacctgactgtggtgttgaatttactgctctgggtatttcaaatgattcaagaatccttactccttacataaagtgcaagttagtggtgagtctgtgggtgctgttgtgaaggcagcagaagaatttttggaaactctggatgagctgattgtggaggaaaattacttgtcacagcaaatcttcaatatgaatgaaacctccccattctggaaacgaatgcctgaaagaactttcattcataaggaagccaagtcaatgtcaggtttgaagacttttaaggacagagcaagtcttgcctggcaacaatgttgcagattacaaactgaaaccctttatgaggaccccagggccttcaagcctgtcaattagcacacacagccagtgcactgcaggagcaataagaagccacagatgacccagctcctcttccaagaggccctcctgaattactctgccagtgagatggagaagtactgtttggagaataatatatctttcaagattggcttattgataatgctcttcttcttcttttttttttttttttgtcattttcatctcaatatcaaagtggtgtttctccctccaaataccacctctttgatccaaccaatgcatcaaggaattataacagcttttaagactattacctaaggaggacttttgcccaggctgttgctgaaactgaggaagaccctgagaagacatggatgtaattttggaaggattacaacatctattactgtgtcaagcactttgagcttgggcttggggtgatgccaccgaggaatgtatgaatggcatctggaggaagacactcaagaggtttttccatgatttcaaaggatttgccaaggatgaggaggttgcaaaagtcaacaaggctgtggttcagatggcaaacaactctaatctgggtttggctgaggatggcattgaggagctcctaaaggaatgaggagttattggaactgggacaggaacacctagctgaagaaggggcaagagcaaagggagctgctggagaaggaaaagaactctcaggaaaactcacagtgaaaaggttgacagaagcttctgcagacttcagcaaactccttaagaagtttgaaagaaggaaaagaactcccaagaaaactcacagtgaaggggttagcagaagcttctgcagacttcagcaaactccttaagaagtttgaaagaaggaaaagaactcccaagaaaactcacagtgaagagtttagcagaagcttccgcagatttcagcaaactctttaagaagtttgaaaacatggacacccaacaccaaaaggtttttattaacagacagaaatgttcatggtgcattatctgtttatagggaaatctatgttaaagaaaagaaacaaaccaagcaaaccaccatggacatatttctgaaaagagtgaccccacctcaagaagatctcaggagggtccttcaggaggtacccagaagaagacattgttatcacaggggataatgcgtgtgttactgcccctgaagaccttccaatgagacaaaatgtggaggtggaggacagtgacattgatgatcctgaccctgtgtaggcctaggctgatgtgtgtgtttgtgtcttcattcctaataaaaaagctgaaagaattttttaaatttttttaaattaaaaataaaaggccaggtatggtggctcatgcctttaatcccagcactttgggaggccgaggcaggcagatcacctgaggttggcagtttaagaccagcctgaccaacatggagaaaccctgtctctactaaaaatatgaaaaacattagccgggtatggtagagcatgcctgtaatcgtagctactcaggaggctgaggctggagaatcgcttgaacccaggagacagaggttgtggtgagccgagattgtgccattgcactccagcctgggctacaagagcaaaacaacgtctcaaaaaaaaaaaaagaaagaaagaaagaaaagagcttataggataaggatacaaagaaagacgataggccgggcatggtatttcacacctataatcctagcactttgggaggtcaaagcgggtggatcacctgaggtcaggagttcgagaccagcctggccatcatggcgaaaccccgtctgtactaaaaatacaaaagttagccaggtgtggtgccaggcacctgtaatcgcagctacccaggagtctaagacaggagaattgcttgaactcaggaggtgaaggttgcagtgagccaagattcacaccactgcactgcagcctgggtgacagagcgagactctgtcttgcaaaaaaaaaaaaagacaatatttttgtacagctgtacaatgtgttttaagtgtaattacagaagagtcaaaaagttaaaaaaataaaaagttgataaagtaaaaagttattggaagctaaggttaatttgttattgaagaaaacaatttttataaatttactgtagcataactgcagtgtttataaagtctatagtagtgtacagtaatgtcctaggccttcacattcactcaccactcactcactcactcacccagagcaacttccggtcctccactcctttgggagttcggtctcccaaagcgctgggattacaggcgtgagccactgcaaatgacagcaactccaagctccattcatgggaagtatcctatataccattttaaaaaatattctaggctgggcacggtggctcacacctgtaatcctagcactttgggaggccgagacaggtggatcacctgaggtcaggagttagagaccagcctggccaatatggtgaaaccccatctctactaaaaatacaaaaattagccaggcatgtgctgcatgcctataatctcagctaccccggaggctgaggcaggagaatcactagaacctgggaggcagaggctgcagtgaactgaaatcatgccactgcagtccagcctgggcgacacagcaagactccatctcaaaaaaagaaaaaaattctataccatatttttgctgtgccttttctatgtttagatatgtttggatacacaaatacctaccactgtgttacagttgcccatagtaaaatgctgtgccggtttgtagcttaggagcagcaggccatacatatagcctaggtgtggaataggctgtgccatctaggtttgtgtaagcacactctgtgatgctcccacaatgatgaaatcgcctaaagacacatttctcagaacgcatccccctcattaaaggatgtatgacaatatatctgcgatataatgtgacaaaaatggcactttacttttgtggtcttcctcccaaaaacccacaatcccagtctaatcatgagaaaaacatcagacaaattccagtggagggacattttgcaaaaatgtctgaccaggactcctcaaatgacaaagtcatcaaaaacagggacagtattactcaggtgtggtggccatgcctgtagtcccagctactcagaaggctgatgcaggaggatcgcttgagcccagcagttcggggctgcagtgagcgataattgtgccatgagctccagcctgggtgaccgagcaagaccttatctctaaaataaaaataacaattaaaagttaactttatttggccgggcgcggtggctcacacctgtactcccagcactttcggaggccgaggcgggcggatcacaaggtcaggagatcgagaccatcctggctaacacggtgaaaccccgtctctactaaaaatagaaaaaattagccgggcgtggtggcgggtgcctgtagtcccagctactcaggaggctgaggcaggagaatggcgtgaacccgggaggtggagcttgcaatgagcctagattgcgccactgcactccagcctgggcgacagagtgagactctgtctcaaaaaaaaaaaaagagagagagagacatctaaggacataaaatgagaatgaaagtaaagagatgggaaaagacatgccaggcaaatactcgcccacataaagctagtataacgtaagataaaataggacttcaggcagaaagatagccattacccaggcgcagtggctcatgcctgtaatcccagcactttgggagatcgaggcgggcagatcacttgaggtcaggagttcgagaccagcctaaccaatatggtgaaaccccatctctaccaaaaacacaaaaattaaccgggcctggtggtgcacacctgtagtcccagctatttgggaggctgaggcaggagaattgcttaacctgggaggcacaggttgcagtaagctgagatcacaccactgcactctagcctgggcaacagagacgctgtcacaggaaaaaaaaaaaaagccattacttaactattcaccagaaaaatatcaccttataagcatctatcgtagagcctcaaaatatataactcagatattctctttttcccaacagctttcattctgaagtaggcttccaaatgaagctcttgatgtcctcattttcccattatttacctgctttctgtcctaacctgaaccatgacattctggaaaatattccaaattttactttacataactttaagtaaaattatgaaatcatagtcactcctctgggcaaaatatatatgtgtgtgtatatcttaaaggcaattcacatggagaattatcaaggatactctatgtttagacttgaactcttgagtttgtcatttaacattagcctgaagtaaaagctcctaactcaatggttcacttgcttacaacttcctcctactccagactcaaaggctgaattagacttcctctttatcaggagctgcacaccacatagtgcttaggggttcacaaaaaaaaaaaaaacctctggcgacttcaagtccagcagggatccagcccccggtgagtgtccacacggcatcgggagggatcacctgcaagaaagagggggcttttttaaaaaacaaaaaaaggcggggcttttttttaagagactacaaaaagaaaaagggactcaggcgtaaacaaatatgtttgcagagtttatcaggaatatgccacgttacacatacatggatttatcaaggtagagcaagtttggttaattagaaggtatgaaatggtgatgaaggtagtaaaagctgctgtgggtgcagaggtgaattccctgcttccccaggcagcaaaggagtgtcaaaaacatgaagctgtcaatgacagcacttcaagatccgcccgtgctaccaattgcacatgacaatgaaattcctccttaggcctgcgggagttttctagaatgttaaaccctgaccttgcaattcctggttgcagtcatttctaatgtcaaatgaacacggttttatctttcacaggctaaccaaatgttggctggactaatgtgcattttacatattatttattttacatattacttattacttattttacatattagtgattttacatattattacttattttacatattacttatacatatgtgtatacacgcatgtatatacttatacatatatgtatacacacatgtatatacttacacatatacatatttgcatattacttattatattttacatattacttaagtaatcaccacaaatacaacatatttttgggaaaatgagtattcacaactatattttgttatgtcaaagggattttgtaagtcagaatcaattagaatgactcagtcatgtaatgcaccacatgtgtacaggtatgtttctaaaagctttaattttattttttcatttctgttatttttttgagacagggtctcattctgttacccaggctggggtgcagtggcataatcatggctcaccgcagcctccaccttcctggctcaggcgatcctcccacctcagcctccggagtagctagtactacaggtgctcgccaccacacccaactaatttttctattttttgtagagatgggttcttgccatgtaacctgggctggtctcaaactcctgagctcaagtgatctgtccaccttggcctcccaaagtgctaggattacaggcgtgagccagtttctaaaagctttaaaatggccgggctcagtggctcacacctataatcccaacactttgggaggccaaggtaggaggaacacttgagcccaggagtttgaaaacaggctaggcaacatggcaagaccctgtctctacaaaaaattaaaaagaattagatgggcatggtggtgcggacttgtggtccccactactcaggaggctgaggtgggaggatagcttgagcccaggaggtcgaggctgcagtgagctatgatcctaccactgcactccagcctaagtgacagagcaagaccctgtataaaaaaaagaaaagaaaaaagagtaatttttaaagcttggaatccttcatggtaagaaaaaactagcatttattaagtgcctactaaaaatcaagcactgttttatacgtagtgccatactttgtacttaaccctcataaccaccacacaagttatgcattatgaaaactagtttatatactgcaactcaaagaagctaagtgattttcccaaagacataacagctggcaaatgacagaattaggacttgaattcacatcttcctacaccaacgcctatattgcccagcatataacacccacccagtaaatgtttgaagaacaaatgtttaaaagccttaatttcaaaggtctatgaactggctgagtgtggtggctcatgcctgtaattctaacactttgagaggccaaggtgggcggatcaattgaggtcaggagttcaagaccagcctggccaacatggtgaaatcccgtctctactaaaaatacaaaaattagccaggctaggatgggcacggtggctcacgcctgtaatcctagcactttgggaggccgaggcgggcggatcatgaggtcaggagatggagaccatcccggctaacaaggtgaaaccccatctctactaaaaatacaaaaattagccaggcatggtggcggcgcctatagtctcagctactcaggaggctgaggcaggagaatggcttgaacccgggaggctgagcttgcagtgagccaagatcgcgccactgcactgcagcctgggcaacagaacaagactctgtctcaaaaaaaaaaattagccaggctaatttttgttgtggcgggcacctgtaatcccatctactcaggaggctgaggcaggagaatagcttgaacctggtaggcagaggtttcagtgagcagagattgtgccaccgcactccaggctgggtgacagagcaagactccatctcaaaaaaaaaaaaagtctataaaccaagactaccaaataactgccatgaattcagttagttatacataaagacaaaaaaaaatgtctaataccacacccacacatatatttagcttcaattttttttttttttaatttaagacgcggtcttgctctgctgcccagtgcagtggtacaatttcagctcactacagccttgacctcctggactcaagtgatcctcctgcctcagccctgcaagtagctgagactacaggcgcacaacactatgcctgctaattttttttattttttgtagagacaagatctcaccatgttgctcagactggtctcgaatgcctggactcaagcgatccgcccgccctcagcctcccaagtgctgggattacagggtgagccaccgcactcggcccaaatatttgtgaacacatttaaactcggtacttttaccacttgatcctgagtcatactttcagaataaaatcatacatcacgactgagagtcaatccccataaaatggctctgcgaaaggaaaacatggcccttgaattaacaagagctgtttatgaagcccaaacaagatggacaaaaaaagaggtgttgtgaaccaaagagttctcctaaacttctctcacctgtgttccctgagaataaaaaagggacaatctttttttttttttgagatggggtctcgctctgtcgcccaggctggagtgcagtggcgccatctctgctcactgcaacctccgcctcccaggttcgtgattctcctgcctcagcctcccaagcagctgggattacaggctgtgcaccaccacactcgcataacttttgtatttttagtagagatggggtttcaccatgttggccaggctggtcgtgaactcctgacctcaggtgatccgcccaccttagccttccaaagtgctgggattacaggcgtgagccaccacgcctggctccagggacaatctttttaaaacaaggaagtcacaaagaggaaaaactgatttgcccctccagaagattcacacttggaaccacagaaaggcttcacaaagaccattttccaccctccaggtgtgtaaaggtggggccacaccccaactcctccagtgtcacctttaccagccacaggtgtatttccctctccccctccctgggaacagaccctacagaaggaacttcttttcccaatgaacgaattgcagagttacagagttctgatgtttatcttcattagatactagaaacgaatgaaccatttagaataaaaccaaacgtcaacatgataccaaacggtgcatctgaacgtgtccctgacctgtgaccttagcacactgaagggtgccaaggctccaacctgctctgccccaacctgttcttctaactgccctaggtgtgtccacacgtgtggtggggtaggtgactctaagaatttcagatacttagattgcaaataatatgagataaagcataattcctcttaaataaagcaggtgctctttttaggaactcttaagttatttgagaaaaaaaaattacagttacaaagcttctaaaaaccatccccagagccataagattgtgacatcaaaaatagtggaggccaggcatggtgggctcacacctgtaattccagcactttgggaggcggaggcatgagaattgctggcatccaggaggcagaggctgccatgagccgggatcacgccactgcattccagagcgactcaggaaaaaaaaaaaaaaccaccagtggatggaaaaataactaaggccaagtgcagtggctcatgcctgtaatctcagcatttgggaaactaaggtgggggcattgcttgagctcaggagtttgagaccagtaacacagcaaaaccccgtcttcattaaaaatacaaaaaattagccaggcatggtggacatgcctctagtcccagctactcaagaggctgaggcaggaggatggcttgagcccaggaattcgaggctgcagtgagctaagatcaggccactgtactccagcacgggcaacagagtgagaccttttctcaaaaaatataaagaataaataaataaataattagggccagtattatgctgaactcatcctaaaaatatgttgttttcaggcatttacgtgatgctcagatcctctcccacattccctccactcaatatcagagcctagcttcagtcagtggagagttggagcaagaaacttacctaggggctaattaatcagcgagtcctacagagagcctgctgcgtgcaagatgctgagctgggccttcatggtggcaccacctgtgcggttctcctcctggctttcgcaaacctgtctagactcctttcctcttgcccccctgcctctgaaacacagcatctcgggctgggcacagtggctcacacctgtaatcccagcactttgggaggccaaggagggtggatcacctgaggtcaggagtttgagaccatcatggccaacatggtgaaaccctactaaaaatacaaaaattagctgggcatggcggcacgtgcctgtaatcccagctactcgggaggctgacgcaggaaaatcacttgagcacaagaggcagaggttgcagtgagctgagatcatgccactgccctccagcctgggtgacagaacaagactccgtctcaaaaaaaaaaattagcctatgtgctggcgtgcacctgtaatcccagccactgcggacgctgaggcaggagaatcgcttgaacccaggaggcagaggttgcagtgagccaagattgtgccactgcaccccagcctgagtagcagagcaaaactctgtctcaaaaaagaaaaaaaaaacatacacacacacacacacatacagagcatcttgctctctggcaccactgtcatacccaacagcctctccttcacttgtggatcagcaaaccccagctcattaaccaaggctcagagccaagacctctgtgaagccatctgtaaaggccacagtagagtggctcctcgtcctctttctccatgtgatgtggctttacaagcacagctaacttccctgtcacacggccagccccttagagaagggaggatgccttcattgccttcattaacacagagtagagttcctataatgacttactaagtcacactgagacctaacgtaaaattaaaccataaggaatcaaggcatatgggtttattgctgtacctttaaatgaaacccacagagaaaagtgaaacgatcatccagttttttaatagcagtagcatctctgaatgttgtcagaaatttttcccttgtggttatttcattacaatttaagaaactttaggagtggcatataaaatattttgcctatcttttttaatttttattttattattttcttaattttttttgtagagatgggggtttcactctgttgcccaggctgcagtgcagtggcatgatcataactcatcatagccttgaactcctggcctcaagagatccttccacttctgcctcccaagtagtgggactacaggtgcacaccactacaatcagctaattttttttggtagagacgggggcttgctctattgcccaggctcatctcaaactcctgacctcaggcaatcctcccacctcagccccctaaagcactgagattatgggtgacagccgccatgccttgcctatattttctttcttatacaatagataaaaatgaaatcaggctgggcacagtggctctcacctgtaatcctagcactttgggaggctgaggtgacaggatcacgtgagtccaggaattcaggatcagcctaggcaacatggcaaaaccccatctctgcaaaaaaaattgtaaaaatttgccaggcatggtggcacgtgcctaaagtcccagctacttgggaagctgaggtgcgaagatcatctgaacccaggaggtcaaggctgcagtgagctgtgatcatgccactgcactccagcctgagtcacaaagtaagaccctgtctcaaaaaacgaaatcaaagtctccacctcccaagccaaaccacaacccttcctgagctccccaccgtcccatctcagtggaagcccatggagcaccatccagagtccccaggtcagaagccctggagtccactctggatgctgcactagacactgcccagggcagcacacctctcctgaagtgctccctgggtttttcctctgtccccactggcctcttctcttggtctcctctgcagatttctaaggcccactccaaaggctggcttggtcctcagtccacactctctcttgcagaaaacaatgcaggtactctgcccagattgcccaggttcctgtatactatggctttacacacctttagctgtaatgtgattttggtcctaatggcagctcctgggccgcttcctttttttttttttttgagatggagtctcgctctgttgcctagggtggagtgcagtggcatgatcttggctcactgcaacctccacctcccaggttcaagcgattctcctgcctcaacctctcaactagctgggattacaggtacccaccaccacgcctggctaatttttgtatttttagtagagatgtgatttcaccatgttggccaggctggtctcgaactcagaaccttgggtgatccgccttggctttccaaagtgctgggattacagtgtgagccactgcgcctggccaacctcttctttagaggactgcctttgggttgccagagtcacaccgtccacaggcacaggagctagaagtgcctgggaggcactagccttagcccaaggttaacacgcctctgcagcaccatctacatgcacaaatgcccctgtcagatcaaactgaagcctatccactgtgggactctggcctgatagtacattctgcttggcttcctccccttccgtatctgcttaccacaatgtcttgtttaaaattaattcatagtttttcagtagagacagatgtctcactatgttgcccgggctagtcttgaactcctggcctcaagtgatcctcctgcctcagcctcccaaagtgctgggattacaggcatgagccaccacacccagcccacgacaatctcttactagtctttgctgggactagttccttaataacatcatatttgctcaaaaattattgtctcaggatctacttccaggaaactcatttggaaacaggaatgggggtgctaaggaacagattcttttttctttttttttttttttttgagatggagtctctctctgtcgcccaggctggagtgcagtggtgtgatctctgctctccacaagctccacctcccgggttcatgccattctcctgcctcagcctcccaagtagctgggactacacgcacccaccaccacgcccagctaattttttgtatttttagtcgagacacggtttcatcgtgtcagccaggatggtctcgatctcctgacctcgtgatccgcccgcctcggcctcccaaagtgctgggattacaggcgtgagccaccgcacccggccgctagggaacagattctaagatgggattttagagctggatcattccccagccaaatggcaatagagtccccattgtcagtgatgagtggattaatggcaagctgtgcaattgcttaactaataatcactagtactttcatctgtgatgaattggctgagatacaaaggaaaaggaagcactggttcacgagctatatttctagcatttgatagacgtggggaagtagctacacagactcagaaatctaatcacttgttgttcagtgctattgaagcaccgaagaaagaccatgacaggttcaggacagccaattatcaactcacagcatggtgtgaaagtcaggtggcctctatggcagcatttaatatagccattttagcatccttttgattggtgttgcatgatacatcttttcccatcgctttaaatttaacctattgatgcccacatatatatgtatatgtgtgtgtgtgtatatatatatgtgtgtgtgtgtgtgtgtatgtatatgtgtgtgtgtgtgtgtgtgtgtgtgtatatatatatatatatatttttttttttttttttgagacagagtctcactctgtcacccaggctggagtacagtggtgcagtcttggctcaccacaacctccgcctcccaggttcaagcaattctcgagtctcagcctcccgagtagctgggattacgggtatgtgccaccacgcccagctaattttgtttttgtttttgggttttttgtttgttgttgttgttgttgttttgtatttttagtagaaatggggttttgccacgttggccaagctggtctcaaactcctggcctcaagtgacccgcctgcctcagcctctcaaagtgctggattacaagcaagcaatagccacaacgcctggctgatgcccttatatttaaagtgtttcttgcaggcagtacataaggttgggtcttacttttgacctaatttgacaatctctccctgttaattggggtgtacgcagcatttccatttaatctgattactgatatggttgggtttagaagttatcatgttgctatttgttctatctgtcccatgtgttctttgttcttttgttcttcttttgttgcctgattttggattgagcattttttatgaattcgcgtatctcctttgttgacttaccagccataagtctttgttgtgtcattttagtagttgctttagggccacctaatccatggagtaagataattcatggtagaataggctaaaaagaagccccagaaattgtccttcctctgaacttgatagtacatttttaaaacaataccattagaatgacttctggaacgacagagtgaggacctccatggactcactttagagaaatgaccaaaactgatgagatttatttaaaaaaaaaaaaaaaagccaggcgcggtggctcatgcctgtaatcccagcactttgggaggccgaggcgagcagatcacctgaggtcaggagttcaagaccagcctgatcaacatggtaaaactccgaatctactaaaaatacaaaattagctgaaaatacaaaattagccaagcatggtggtacacacctgtaatcccagctacttgggagcctgaggcaagagaatcgcttgaacctgggaggcggaggttgcagtaagccaagatcgtgccattgcactccagcctgggcaataagagcaaaactctgtctcaaaaaaaacaaatgatgatttaaagtctctggaaattgtcctcatggcatgaagcaaataaagatgcatttattcaagaaaatctattaaatctcaataagaacactcagagtctgtagcatttgagtcacaactcactccttccctaacccccaactcagcatgatgaaagtcctacccctggccaggtgcagtggctcacacctgtaatcccagcactttgggaggccgaggcagatggatcatctgaggtcaggagttcgagaccagcctagccaacatggtgaaaccccatctctgccaaaaatacaaaaattagccgggcttggtggcaggcaactgtaatcccagctacacaggaggctgaggcatgagaattgcttgaacctgggaggcagagattgcagtgagccaagatcatgccacagcactccagcctgggcaacagagtgagaccctgtctcacaaaaaaaaaaaaaaaactgactgtggtgatggttgcacatatttgtcaatatactaaaaaccactgaactgtatactttaaatgactgaatcgtatgatatgtgaactatatctcaataaagatgggttgcttttttttaatctaacgaacttgatattaaaaggttaaataaggccaggcacagtggctcacacctgtaatcccaacactttgggaggcgaaggtgaaaggatcagctgaagccagaagttcgagaccagcttgggcaacatagtgaggcccccatctctacaaaataaaaaataataataaatagtaataataaataaaagattaaataagaaaacagtatcttaaccttttttttttaagtacaaaggtaattactagaacaaaaacatctaccttcaggctggctgcagtgactcacacttgtaattctagcacttcaagaggcaagggcagttggattgtttgaggaatggagtttgagaccagcctgggcaacatagcaagaccccatctctacaaaaaatttcaaaattaactaggagtggtggtacatgcctgtagtcccaactactcaggaggctgaggtgggaggatcacttgagcccaagagttcgaggctaccatgaggtatgatcataccactgcaccccagcctgggtgacacagtgagagcctgtctccaaaaaagcaaacaaacaaacaaaaaatccatcttttaaatatcctaaatatccaaatacatttagaaaataaaagaacaaagaaaatatcaaatagagaaggaaatacagaaacacatataacatatatataacacacataacaattatattataaaataatatgacacaattgagactgttaatacatatctgtgggcttaagtccactgagaggattgactagtttattaaaagacaaagattcggccaggcatggtggctcatgcctgtaaagcacttttggaggtcaaagtgggcagatcacttgaggtcagaagtttgagactagcctggccaaaatggcaaagccccatctctacaaaaaatacaaaaattagccaggcatggtggtgtgtgcctgtagtcccagctatttgggaggctgagacaagaaaatcacttgaactcgggaggcagaggttgcagtgagccgagattacgccactgcactccagcctgggcgacagagcaagactccatctcaaaaaagaaaagaaaaaaaaaaaaagacaaagatcaaagatttccagcttcactcacaaagcaaaactcagctatatgctgtatacatgattcgcacatgaatggaagtgattgcgaaaggctaaaaataaaaagatgggcaaaggcatttaacagtcaaatggagaccataagagaacagcggagtgacaagactcaatttgcactttaaggagatggctcaggtttctgcgtggaggatggattgaggggggtgttgttatataaagtggtcaaagatggcctctgtagattggccatctttgtttatttcttcaccgcagactgagacctattcgttcaaaggccgactcaaatttttatacatccagttgttctaaaaatagcccacacaaccgggcgcggtggctcacgcctgtaatcccagcacttcaggagaccaaggcgggtggatcacctgaggtcaggagttcgagaccagcctgaccaacatggtgaaactctgtctctactaaaaatacaaaaattagccaggcgtggtggcgggcacctataatcccagctactcgggaggctgaagcaggagaatcacttgaacccgggagggggaggctgcagtgcgccaagatggcaccattgcactccagcctgggcaacaagagcaaaactccatctcaataaataaataaataaagcccacacaagcagattttcagccattgcttgtgaaactccacccagcatctgctggcacggatcagatggagtctgtggttctgagacttcaagctgctctctgacctagagactcccctcagtgctgctggagggcaccacctagacatgtcaacccccctcatcagtccccctctctcctgggagtgcccttgctcttctccccttctaagtagagacccccaagctctagcctccagagagtttcttgctgagacgtgcttgctccccatggcaatgtccaagcatcacacattaagcttgttgtgctacttctactttatggttctctcttttcccttgctcaagtctcatttcccccaaatcctctacagtgggcaatcaccccaatgaaagatgaaagcagccagacaggagaggactggaccaggcatggtggttcgtgcttgtaatcccagcactttgggaagccaaggccggaggatcacttgagcccaggagttcaagaccagcctgggcaacatagggagacctcgtctacacaaaaaaaaaatacaaaaattagtctagcatggtggtgcacgcctgtagtcccagctactcagggggctgagtgggaggatcacttgagccctggaggttgaggctgcagtgagccaagatcacaccactgtactccagcctgcagtctgggtgacagagtaagatcctgtctcaaaaaaaaagaaaaagaaagagagatacactttgtatcatgtcccaatgtatgtatgcatgtatgtgtcacacacatacatatacatccatgaaaccatacttgccttcactttgccatgtatttttatttgcattttctatgtgtttcttttttatttttaagagatgggggtctcactatgttgcccaggctagagtgcagtggctattcccaggtgttgtcattgtgcactacagcctggaattcccgggctcaagcagtcctcctgcctcatcctcctaacctggagctacaggcgcaccaccatcctttttttaaattttattttcaaatagttgctagtcatgagcctttaaattaacttcatgatccactaacaggcgacatcctgcagtttggaaaaccctgcatttcaccatgattgcttatgtttctgctccttaaatatgtccttggatttatgatgaaaatgggggaaaaaaagtgattttttttttcatgagttacctctcttttctccatgttccctctggtttttctaggaagcccacactttgcattgctggttttcaataatagtgaactaaaggaatccgagaacttctagacacaataggcctaagccaaaggaaaaagagagtccctgaagcaagtgttttctcctggccgtaagaagtactcacagccaggcatggtggctcacacctataatcccagcactttggaaggccagggcaggaggattgcttgagcccaggagttcgagaacagctgggcaatatagggaaaccgcatctctataaaaaaatacaacaatgaggtgtgatggcacatgcctgcagtcccagtacttggaagactgaggcaggacaatcaattgagcccaggaagtcgaggctgcagtgagctatgattgcaccactgcactctggcctgggcaatgaagtgagaccctgtctcaaaaaaaaaagaagaagggggagggggaggggagaggaggaggaagaggagaaggacaagggggaggaggaggaagaggaggaggaggaataggaggagaaagaggagaaggaggaggaggagaaggataagcagaaggagaaagagaaggaggagaaggagaaggagaagaaagaagacagaagaagctcacagccctctggatacctgcagttaaaggaggcagcctgtgtacaactgagcccccagccacttactcattactgtctgtgtgactccttgccgaatacatgcacactctctggggtgtctttgtaagtggaatttaggaacaagagaatttgctaaaatgggaaatttgagataccttcctatattcttttggtgtataaagtagcacagaaaaggaaatatacataagaacttcatcaaagttctttagtgaataaagatgagaatctcattattaaattaattaacattattaccaagaacagaataaacaagaatccagatgctggaaatgttccctttccttttatttagaataaaaatattacatagaaaaagaatattctgtatataaatacaatagaacaagtgacctacagtttgacttctccacagcctagagtacccacagagtcatttttttgaacacaatgtatcttatgaataagcctctacacttttaaaattgagtttttctctttttgaagtacagcttcaagcaactacaagtttccatcctgctaaccccaggcagcagttgcttttaacttctatcttttatttaaaaaacttaattggaagtttttgtagccagaaggagcacttcaaagaaagaaaaaaaaattaccaaaaattaatactttatgtcagaggttagtagggaaagaaacaaagattacagaaaaagaagagttaatggtatctaacaaagcagtgaaagaagaaaagaggcagaaaacgaactgaaggaagaagtgaaaagggaaacttgtaacattaaaaacagaaaatgtggagtaacattttccttactccaaacaggatgagacaacacaaacgttacagcagcatttataatttcctgcacagccaaaaagctctgtgtacaaatcctcccgcccctgctcaagtcttttactcctgtctacaattacacatcaagggaccacagcacttcctgcactttaatttccagacactcctgtcactgtcaattctaaatcaactctgacaaaacagtattaaaacttcaggcatgatttagtattctgcctttgaggcgagtgcagaggaagaaggccctggattgagagggtcaagagatgagggtctttgtcccagctctgccatcagtttacgtgacactttaagcaggtccctttccctctctagagttcagtgatgtcattgtacaggaagagggttggagattcctggggttccttccagctctgataaactgtggcactatgatcctagcgtattagtgatcttagtgaatctcccataacactcgccaaagatactgccaacagggaaattagatgactatccaagactcgctccagaagttcatagagtcagagtcaataatagatcctactatttcaaatgggaaaaatttcctatgcttggctgatgacaatcaaattgaaaacaagtccccaatatcagaatagctatgaaataagactaaagacttcactgttctcagacaggcaagacttttcttacataaaaaatcataacatagtgttgatagatcagaagaatgattatagtttacagtaatctattgcatatttatttcaaaatagctagacgagaataatttcaatgtttctagcgtaaagaaaaggcaaatatttaaggtggtagatatatcaattgcactgatttgatctgagctatgattgcaccactgcactccagcctgagtgacagagcaagaccttgtctcaaaaatagatgggtacataaataaataatcacctctacgccaaaagtatgtatacatattacataccaataaaaataaaatattaaaaaatcataacagcctgtctctacaaaacatttaaaaattatccaggcttggtggtacgcacctatagtcccagctactcaggaagccgagttgggaggattgcttgagcccacgaggtcaagactgcagtgagctattattgtgctactgagctccaacctgggtgacagagcgagaccctgtctcataaaacaaaacaaggctgggcacggcggttcacgtttgtaattccagcactttgggaggcccaggtgagcggatcacttgaggccacaagtttgagaccagcctggccaacatgccgaaacactgtctctactaaaaacacaaaattagcccagcgtggtggcgggaagcctgtaataccagctactagggaggctgaggcaggagaatcgcttgaacccaggaggcggaggttgcagtgagccaatattgcaccactgcactccagcctgagcaacagagcaagattttgtcgaaataagaaagaaagcaagaaagaaagaaagaaaatttgaacaataaacttgatttaatgaaccaataactaaaaaacagactatatactcttttcagtcacatggagcatttacaaaaactggccattcaaaaggttaaggcaaatgttttttaaaaagttaaaaacaaatgttaaacattccaaagcgtacaggccttaatctctatcaacatgtaattaagttaggattcaatcataaaaatatatttttttcaaatctgtatgtttggaaatttaaaaacatttcagaaatacaccgaggtcagagaaaaaaatatcagggaaattaaaaagtgcttataaaggaaaacattaaacataacataccaaaactagcaggataattctactcccatttagaatgtaggaggttacaagacaatgtttccccactctaacaacaagaaaaagatggttaaccgctaatcacggtctttccaagtacatcagagagctgagaatgcataaaacctaatgaaaagaacccaaaaactgacaagcatggttgccttcccttggtcgtgcagcagggggcagaggatctcgctgcagatgggtaagaagggtgaacttttaatgaatttctagagatgaaatgaaggtttgagtgatggtttagaatccctaacagccccatacacacagactctgtgctcatagccaactctactccatggatctttaccaaatgtatgtgaaaaaaactggagacagaacaggagaactgttgagagaccctctctgagcacatgtgtggagcctctgggcctgcggaacaataaaagaaatgactagcgtctgtgtgactggggtaccagaggaaagaagaaagagaaggagtcaaaataagtattagaagaaataatggctaaaacttttccaatttggctaatttttagaattttttgtagagacaaggtctcactgtattgcccgggctggtctcaaactcttgacctcaagaaatccttccagagataaactcacagattcaagaaactcagtgaagcacagtagaataaacacaaagaaaaatacccctatgtatatcatggcactagtgaaaccaagaataatgagaaaatcttgaaaatagagaaaacgtagagcaataattaaaattaccagccacttctcatcagaaagtatgaaggcagaagacagggaaataacatctttgaaatgctaaaagaaaaaagaaacgaccaaccaatagttcagtatacagagtaaatatccttaaaacatgaactcaaaataagggcattttcaaataatataggttgatgatagaacaaaaggaaaagctataactatcaagtttctagaagaaacacagaatgtcttggaaaacttgggataggcaaagattattttaaaggaaattgaaaacactaaattttaaaagcttatgacaaaccgggtatcattaaaactaataacttgggctcttaaaaagataccattaaaagaaagaaaaagcaagccatagaccagaagaaaatattcaacacacatgtcttgtatttagaacaaagaacttatatcgggaagtgaaaataaaagaactcttacaaatcaataataataaacaatccaactgaaaaaaaaatgagcaaaagacactgtaagaagctgtatggatagccaacaagcacattaaaagttgctcaaatttaaggaaacgcaacacaaaaccactgtgaaataccactactcccccattcgaatggctaaagtaaaaagcattgacaagccaggcgctatggctcacgcctgtaatcccagcactttgggagaccgaggagggcggatcacctgaggccaggagttcaagaccagcctgggcaacatggtgaaaccccatctctactaaaaatacaaaagctagctgggcatggtggcgcatgcctgtagtcccagctactcaggaggccaaggcaggagaatcacttgaacctggggagttcaggttgcagtgagtcgagatcgtgccactgcactcccgcctgggtgacagagtgagaccctgtctcaaaaaaataaataaataagtaaagtctggaagagagagatgtgattacctggtaaagagttttccacttgacatttctcagcatataaatgggttatgggtgagtcaagatgtgacagctgaaggctgcgagagcctctagactggtcacctcaagccctgggtggccttactgaccccagtgtgccaaaacaagtggtcattttctgcatgggccatgatatgaaaaagtttaggaagtattaacataaggaacgggaatatagagaaaaggctcaaatacagaggcctggggtagctagcacgtagaggccaggaagatgaggaataaccagcaaaggagactaagaaagcatgagcagtgatgaaggtggtgagccatgacagtgtgttatcccaaagccaagggtttgcaaagagtttgaagaaaggagtgactatgtcaaatgctgtagacgggtcaagaaagagaaggtttaggctaggcatggtggctcatggctgtaatcccagcactttgggaggccaaggcgggcagatggcttgagcccaggagttcgataccagcctgggtaacatgatgaaaccctgtctctacaaaaaatttaaaaattagccaagcgtggtggcactcacctgtagtctcagctgctcggcagggctgtggtgggagtatcacttgagcctgggaggttgtggctgcagtgagccaagatcacaccactgcactttagtctgcacaacagagtgagaccctgtctcgaaagagaaagaaaagaaagaaaggaagaaagagagagagagagaaaaggaaggaaggaagggagggagtgagtgagggaaggagagagagagatgaaagaaagaaagaaagaaagaaagaaagaaagaaagaaagaaagaaagaaagaaagagaaagaaagaaagagaaagagagagaaataaagaaggaaagaaggaaagaaaagaaagaaagaaagaaagaaagaaagaaaagaaagaaagaaagaaagaaagaaagaaagaaagaaagaaagaaagaaagaaagaaagaaagggaaagaaagagaaagaaaagaaaagaaagagcgagaaagagagatggggtgcagtggctcaccctgtaatccgagcactttgggaggccaaggtaggtggattacctgaggtcgggagttggaaaccagcctgaccaacatggagaaaccctgtctctactaaaaatacaaaattagctgggtgtggtggggcatgcctgcaatctcagctactcaggaggctgaagcaggagaatcgcttgaacccgggaggtggagattgcagtgagccgagatcgtgccattgcactgcagcctgggcaacaagaatgaaactccatctcaaaaaaaaaagagagagaaaaagagagagagagaaagaaagaaaaggtctgagaaatgaccaccgaatttagcaaatcagagtcattggtgaccttgacataagttacttcagtagaggacaaggcagggttgaaaacctgaccacatgcattcaagaaagaatatgatcactttttcaaggagttttgctataaagtggaggagagaaataaagtcatccctagagaaggttatagaataatgaagttctttgaatcttaagatgggtgacatagcaaacgtacatccgacgggaatgttccagtggatggggaaaatgtgatgagacagaaaagggaaaatctgctggagagtgttcttaagaaggcacaagaagataggatgtaatgcacaaaacaaaaggtttgccttagaagtatacccggaataacagaagagaaggcaaagtatatatggagagacacatagaacatcgtgcagatgtgatggaacatatgcaagttctctttcattgttgaaagtgagagtaagagagaagatatttgaagtttcaggaaaaataagttgttaaggagtcatctaaaataatctattgcttttgttactaagtaatcaatgggctggctgcccaatgcacatagaggctaatagcatggcactggcttttgaaaaaagaaatatttttttgtgaattgactggcaaggagacaggaggaaacactcaaatctgtctccctgagctgggatttggatcaggttttataagcataggataatgaagtatgatctgattggatcttgcagtgaggtgattgccaggaggcatgatctaactggatcctgccaagaggtaacatcagagcttgatctgattggatcctggatgccaccacgtggtgtctgctttttaattcagtcccctctcctcagtccaagcacttaggatccccctaccctgactgttcatctgggcatgctcaagttacatgacctttgacctgggggtccatggcaactgaaaaacaactcacaactttgttacataaaagttgagccagattgatctggtgcaattacactttcttccctcaacaatcaatccagggaaacagccattttaagaacctgctactcagtacatatacatctaatgaaaagggttcttatgagcatatgtattatatttaagctatatatttaatcttcaccatgagaaaacacaaatgataaacataccttatctcaagtaattacaccatattccccactacctctgctctcgaatgcacagtttagcagttatttgcgctaaaattatccttctacacatcaaatccactaaaggagctagtctcttttaaagaaatgaacctaataatctgtatgaataaaaccatgtcccaaattctctataaagtatattaagagcagaactatgatttaatgccaagtaaattttaaatattacaccttaaaatgcatcatgttcacataaacaattatataacagactggaaattcaggagctaataatgcagttttcagcaacaaaatcaaagttcatttcctccacagcacccctgtctctacagcccactcatatactatgtatgaacagcttccatatatatgatgtttctcagtgggttttctccaacctgggcagcagagcaaaaccctgtctcaaaaaaaaaaaaaaaaagaaaaaggaaagaaagaaaaatggccaggcacagtggctcacacctgtaatcccagcactttgggaggctaaggctggtggatcacctgaggtcagagttcaagaccagcctggccaatatggcgaaatgctgtctctactaaaaatacaaaaattagccaggtgtggtggtgtgctcctgtaatcccagctactcaggaggctgaggcacgaaaatcacttgaacccaggaagcagaggttgcggtgagccaaggttgcaccagtgcactccagcctaagcaacaaaagcgaaactccatctcaagaaaagaaaaagaaaaagaaatgtcattttcattgagcattggatcaatttagaagttgatattcatagaataataaccacatcacactatctttctaaaattccaacacagaataataagaccaattactgggtatgctcagcctgtgggggccaagagggcagatattctctgcatctatcccacttggagagtccagagaagcagaggatgttttccagggaggctgctgagatgtagggcccacccaggaaagtctgagggctatcctgggaaaaggataaggataaggataactcattttttcaaaaaagcaagtgggagaggcattagatttaaagtatttgccaaatacaaagcaatttcaaagccttaaaaaattctacaagatattcattcaacaaatattgataggccaggtgtggtggctcatgcctgtaatcccagcactttgggaggccgaggcgggcagatcacctgaggtcaggagtttgagaccagcctgaccaacatggtgaaactcatctctactaaaaacacaaaaaaattatctgggcatggtggtgcacacctgtaatcccagctacttgggaggctgagacagaataatcacttgaatccgggaggcagaggttgcagtgagctgagatcgagccattgcactccagcctgggcaataaaaataaaaatacagctaatggtgtttctttctcggtggcggaattcagggaggattatatattttctaaattttatcactgcagttttctgcattgtttgagctctttaaaatgaacaaaacggcttgttttcacacatccaaatgccgagccgccaacacacctaggatgccccatggaagctgaagccacacttcccacatggcccctctggccagccgggcatctcagatgacagctgcatacaggccagcacctgcagctcagccgccaacagtggcatccacctctgcagttggctctcctgctgctgctccccagcagccaggtctgagggcccagatggcaaccactgcagctgacgtggctgtgggctctgctgtggggcacacactgggccacgccgtcaccgggggcttcagtggaggaagtaatgctgagcctgtaaggcctgacatcacttaccagtagcctcagggaatccagtcggcacagcagcagcggccttgcttctatgagaccagtttttggaggatgcacagaaccagggtgacagaaagctctgtgagggtttcagtgaggtgctgaaacagtgcagaccttcaaacagattggcctaatcaagaaggtcaaattggagtaatgaaaaatcagctctcataaccaagttaatttagtataaaaatataattgatagtgaaggtataaagtgtaaccatcagttaaacctctccttgtcattcatagcttccttgcttcagaattgaaatgaaagaaggtgctcttactgtgcagaatttcattaaggtcgtgtagaatttggggctgggcaaatgtttgtgtagcctccttaaactagctgtgattttattctctgtgagttaattaaaataaagtgattttcttccaaaaataaaaatgaaaatgaaatgaatgaaatgaaaaatgtaatatcattgtcatcaaaccaacactgatttttctttaaaaaaaaaaaaaaagatttaaattaaatatgcaaaaatgttcactgctggctgggtgaggtgactcatgccagtaatcccagcactttgggtggccaaaggggtggatcacctgaggtcaggagttcgagaccagcctggtcaaaacggcaaaagcctgtctctactaaaaatacaaaaaattagccaggagtggtggcgggtgcctgtaatcgcagctacttgagagcctgagaaaggagaattgcttaaacccgggaggcggaggttgcagttaggagagatcatgccattgcactccaacctgggtgacagagagagactctgtctcaaaaaaaaaaaaagttagcagtgattgattctcagtgataggaatgtggatgattgttgttttcttttcttttcttttctttttgagacagagtctcactctgtcaccagactagagtgcattggtgggatctcagctcactgcatcctccgcctcccgggttcaagcaattttcctgcctcagcctcccaagtagctaggactataggcaggtgccaccaagcccggctaatttttctatttttagtaaagacagggtttcactatgttggccaggctggtctcaaactcctgacctcactattgtcctgcctcaccctcccaaagcgctgggattataggtgtgagccaccgcacccggccaaaaaaaattttttttaaccacaaaaaggaaaacacttgaagttgggctataaaggaaagacttcagggaagacggaagatgaatttgaataaggccgtgaaaaatgaataggattcataaaagcacaaagaatgagaaagttcgcgaaagctcaagtaaactagttttgctgacgagactatggtttagtgaataattagaaggaagcctcaatacagaatgaggtcaactcagggaggaccattaatgccaggatgagaagtctgagatttattttatgggcaatgagagccacttaaacgtttaatgcaggtctttcacatgatcagtgtggtattttaggaagaccacactggcatagcataagcccagatgtggggaggctgtcactaaacccctcagtctccctctaggatgccttttttaaaaataaaaaataataacatgagctttgggaacagagttaccctccaacaatagttgctggatgaacatctccatgacattcactgctgcacattccttgtttaattggaagagaccacagatgaccaaatcataggctgacacattcaagccctgccttgtgataaaactaaataagacagggcttacccagggtaaccacaggacaagggggaggaaccttccactctgctccccaagggtaaccactgaacaagcaggaggaaacttccactctgctccccgtttcctacatccagacaaaatgccagcatccctagtccacttcattttgttctagtcaagtccattttttttttttgagatgaagtctcattctgttgcccaggctggagtgcagtggcacgatctcggctcactgcaagctctgcctcccgagttcacgccattctcctgcctcagcctcccgagtagctgggactacaggcgcccgccaccacccccggctaattttttgtatttttagtagagatggggtttcactgtgttagccaggatggtctcgatctcctgacctcgtgatccacctgccttggcctcccaaagtgctgggattacaggcttgagccactgcgcctggcccttttttttttttttttaagagagagagagacaaggtctgactctgttgcccagactggagtacagtggcgagatcttagctcactgccagcctctacctcctgggcgcaagcaatcctccagcctcatcctcctgagtagctgtctccctagtagtgtaccaccatgccctgctaattttttaattttctaatagagatattgcccaggctggtctcgaactcctgggtttaagcaatcctcccacctcagtctctgtaatcccagagtgctgggattacaggcatgagccacagcatccagcctaatttgttaaattttttatgagctctgcgagcataatgtaaagatcccaatgctggtcctcatcctctccatgtacctgccattggtgttcatgctattaggtcttaggacttttgggcttcctacccttttgctttgcctctctttggctgtgatagcaatggtcatctctgcagattggacaaaaccaattgtattagtccgttctcacgctgctatgaagaaatacccaagactaggtaatttataaagaaacgaggtttaattgactcacagttctgcatggctgaggaagcctcaggaaacttacaatcatggaggaaggtgcttcttcatagggctgcaggagagagaatgagagcaagcaggggaaatgccagttgcttataaaaccatcagatcggctgggcatggtggctcatgcctgtaatcccagcactttgggaggccgaggtgggcagatcacgaggtcaagagatcaagaccatcctggccaacatggtgaaaccccgtctctactaaaaatacaaaaattagttgggcatggtggcacgcgcctgtaggtccagctacttgggaggctgaggcaggagaattgcttggacccgggaggcggaggttgcagtgagccaagattgtgccactgcactccagcctggcgacagagcaagactccgtctccaaaaaaaaaaaaaaaatcagaccctgtgagattcactcattttcacaagaacagtatgggagaaaccatccccatgatccaattacctccacctggtcccgcctttgacatgtgggtgggacctttacaattcagtgtgagatttgggtggggacacagggccaaaccatatcaccagttattggcattggcatcttggcctgtactctttaccttttagggctttttgtcctggagcagatgccacagaaagactactgaaatgcttatttctacccctcaaaacactataaacacaggggtgaggctgtgcaggctcttctgttctccaccaaagtgttctacacttcatcatcttgggaaagaagcttaattcacacaggctctcattctgtgcttggcataaagtatacccagcagcagaaaaccaggaggttaacactcagtctcagacttctcttcgttttgttaaacactctaaaaaatgtaacagggcatgctatgtcttcctgatcaaatattatcaatatctcctaatatcccaaataaaatcttttggaaggaaagaaactaatatttgtaaggggtatcttgtgtgccagactttcttctaagcagtttccatacattgtttatttaatctccaaaacaacccttttagttgggtatttttgtttgttggttggtttttgtttgagacaggctctcactctgtcacccaggctggaatgtaatgatgtcatcatagctcactgtagcctcaacctcccaacctccccagcccaagtcatccttccagctcagcctcccaagcagctggaatgacaggcaccaaccaccacatcaggctaattttttaattttatgtagagatattgcccagagtggtctcagactcctaggctcaagtgatcctcccacctcagcctcccagagtgctaggattacaggcatggcactggcctccaatctgattatttcgataaaagtaatactgtggaaagccgactagcagtagctgctaaaattaaacatatacataccttacgacccagaaattttacttctgccagggcctagtggtgcattcctgtaattctagcactttgggaggctggggtgggaggatctcttgagcccaggagccggaggctacattttgagctatgatcacaccactgcactctagcctgggcagcagagcaagactctgtctcaaaaacaatttttttttaatgtaaaaagagtgtgaaatctttgggatttcctcatgcactcatatattacattttatggggttcacacaaactaaacttggtagtagtacaattatttgataagaatatattttagctccctctccctctccctctttccacggtctccctctggactgtgctgctgccatctcggctcactgcaacctccctgcctgattctcttgcctcagcctgccgagtgcctgcgattgcaggcgcgcgccgccacgcctgacgggttttcgtatttttttggtggagacggggtttcgctgtgttggccgggctgatctccagctcctaaccgcgagtgatctgccagcctcggcctcccgaggtgccgggattgcagacggagtctcgttaactcagtgctcaatggtgcccaggctggagtgcagtggcgtgatctcggctacaacctccacctcccagccgcctgccttggccccccaaagtgccgagattgcagcctctgcccggcggctaccccgtctgggaagtgaggtgcgtctctgcctggccgcccatcgtctgggatgtgaggagcccctctgcctggctgcccagtctggaaagtgaagagcgtctctgcccggccgccatcccacctaggaagtgaggagcgcctcttcctggccaccatcccatctaggaagtgaggggcgtctctgcccggccgcccatcgtctgagatgtggggagcgcctctgccccgccaccccgtctgggaggtgaggagcgtctctgcccggccgccccgtctgagaagtgaggagaccctccgcctggcaaccgccccatctgagaagtgaggagcccctccgcccggctgccaccccgtctgggaagtgaggagcgtctccgcccggcagccaccccgtccggaagggaggtgggggggtcagccccccgcccggccagccaccccgtccgggaggtgaggggcgcctctgcccggccgcccctactgggaagtgaggagcccctctgcccagccagccgccccgtccgggagggaggtgggggggtcagccccccgcccggccagccgccacgtccgggagggaggtgggggggtcagcccccgccaggcgagacgccccgtcagggagggaggtggggggtcagccccctgcccggccagccgccccgtctgggaggtgaggggcgcctctgcccggcagcccctactgggaagtgaggagcccctctgcccggccagccgccccgtccgggagggaggtgggggggtcagccccccacccggccagccgccccgtccgggagggaggtgggggagtcagccccccgcccggccagccgccccgtccgggaggtgaggggcgcctctgcccggctgcccctactgggaagtgaggagcccctctgcccggccaccaccccgtctgggaggtgtacccaacaactcattgagaacgggccatgatgacaatggcggttttgtggaatagaaaagggggaaaggtgaggaaaagattgagaaatcggatggttgccgtgtctgtgtagaaagaagtagacatgggagacttttcattttgttctgtactaagaaaaattcttctgccttgggatcctgttgatctatgaccttacccccaaccctgtgctctctgaaacatgtgctgtgtccactcagggttaaatggattaagggcggtgcaagatgtactttgttaaacagatgcttgaaggcagcatgctcgttaagagtcatcaccattccctaatctcaagtacccagggacacacacactctgcctaggaaaaccagagacctttgttcacttgtttatctgctgaccttccctccactattgtcctatgaccctgccaaatccccctctgcgagaaacacccaagaatgatcaataaaaataaataaataaaaaataaataaataaataaaaaagaatatattttattggctgggcacggtggctcgcacctgtaatctcagcactttgggaggctgaagcgggcggatcacctgaggtcaggagttcgagaccagcctggccaacatgatgaaaccccatctctgctaaaaatacaaaattatctgggagtggtggcgtgcgcctgtaatcccagctacttgggaggctgaggcaggagaatcgcttgaacacgggaggcggaggttgagccgagatcgcgccactgcactccagcctaggcaacaagagtgaaactctgtctaaaaatatatttttttaaatttgttttgtatcaagaaaaaaatacgaaaacataactttattgtagcaatctaatgcaggtgtcttttaaaactatcttttatttccagatgggacttgggaatttctttgttttattttttaaatacattatctttcacaaactcggggaggaacaactgttttttaaccaaaaactcctcacccaggaacaagcaaactgcctgagagctgcatctattttgcaatagtgcccctgaagcgcgcacgacgccgcagggtaggcgtcccgctcctgactggactcgtggcacggtcctaaatttgcagagggacccagggaggatcaacccactcgacactggcaatgtccccaccttccctagctgcaaactgaaaccagcagccgagcctcccgctctagaggcgcggcgaggggcgtggccgcggctggggtggggctaggggccgggtcgtgccccccgaaactgggccgtgccccccgcccacctcactgcgcctgcgcccgagggcgcggggcaggctgggaagtagcgttaaggtggtggttgggtgctttgcgggtcacttgttgcgctgcccgcacgtttgtcgcggctcctggatgcctctttggccgcctcgcctgttccggctctcttatctgcccagtcttcccggcccctgccccggaccctcctgcgcgcccctccggctgcctgtgtgcgaccccagcaaccggcccggggtctcgccggcgccgtcaggtcatcgtccacccggcttgttctcagcttaccgagaacgccccagcccctgcgctcctcctgtcttacttgtgttgagtcatttaatccgctttgcaattgagacattgaaacggagacgctcaggaacgtgcttcaggtcacagatccaagatgagttagggcctggaattgagtcgggctgcctgccaccattccaccttgcatgtcacacctggacgaataccctgtgcttcacctaaattcgcctaaattttcactatttctttttattttcttttctttttttttttttttcttgatacaaggtcttggtagcccaggctggagtatattggcgtgaccagagctagctcactggagctttgaactcctggggctcaagtgattctcccgcctcagactcccaaatagctgaggctacaggcgcaggccactacacccggctaattatgacatttttgtagagggggcggtctcactatgttgcacaggctggtctccaactcctgggctcaaaagatctcccacctcggcctccaaaagtgctgggattaccggcgtgagccaccgcatccggcctgttcactatttcttttttcttgactttcttctttttttttttttttcggaggcagagtctcactctgtcgcccaagctgtaatgcagtggcgcaatctcggcacactgcaacctctgcctcccggattcgagtgatcgcctcagctgggattacaggtgcctgccaccacgcctggctaatttttgtacttttaatagaaacagagttttgccataatggccagactgggcttgaactcccgacctcaagtgattcaccctcctcggcctccgtaagtgctgggattacaggtgtgagccactgcgcctggcctgtacactatttcttaatccctgccagggcggtgttatctttgcagctgagagttctaagtgacttgacaaaggacactagcgcaactttaatagcaaagcctgggccatttccaccaccacatgtgtggcctgtgttctttcccacaccttttaaaattttaaacagccttattgaagtgctggtgtaaagcctgtacatatttaaagcatacagtttgccttttacatatgtgtgtatacatccctgaaaccaccaccacaatcaagagaatgaacataaaagtttccttctgctcatttataatccttcctcccagtcacagcctaccgtatcagtccctcagataacagtgaatctgcttttggtcaccgtggattagtttgcgtcctgtagaattatatgttaaggaatcatatactatctgctttttctcagggtagaggacagttactgaggccaaggggtcacttcatgatgagcatagaggccaatactatggcatgagattttgagaaaaggaaagctttattgccagttgaccagcaaggagacaggaggccagatcaagtctatctccccatgctggccttaaggcagtacatttattaggaaggtttaggggatgagttagggatcaacaggtagaaagaaaggggaggtctggaaagtccttgggcatgcacagttgtctcttgatgggttgcatgtgcaaatccaggatgcgagagtgaatatggaacatgctgcggaagttcagactgtgatgtcagcagcctctttctgcacagactccagttggccatgttggttccaactgatttcagccagtttcgttctcttataattaaagggagtttctgcaaaatgtttcttgtcttatctgccatcatgtaagctcaagaattcctggcggggtgtggtggctcacgcctgtaatcccagcactttgggaggccgaggtggctggatcacctgaggtcaggagttcgagaccagctgaccaacatggtgaaatcccgtctctactaacaccacaaaaattagctgggcatagtggcagacgcctataatcccagctgctccggaggctgaggcaggagaatcgcttgaacccgggacaaggttgcagtgagctgagatcacaccaccgcactccagcctgggggacagagcaaaattttatctcaaaaaaaaagaattcctgttagtcacctgtttaaccctttggggtacgatttcacttcttagctctgtgcttgcaaaataattagacatcctgttatcaagaaagtatggccagataaaactggtctggaagttacacagtcaagcttaactattttgaaattcacccatgttgctgaatagatcagtagttcatttcttgtcattgctgagtagaattccattgtattgatatactgcaattttttaaatccattcctccattgttcacttttcagtttctggctataacaaacaaaacttctatcaacatgggtgtgcaagtctttgtatgaatgtacccttttatttggattaatagcagtgaaatggttgtgtcaaacagtgggtgtatgttcaactttttaagaaactgccaaactttttcagatgagatcaggtgtgtttagggtgatatggccatagacccaaactatttttcaaagtggttgttccagaccaggcatggtggctcatgcctgtaatcccagcaccttgggaggctgaggtaggcggatcacctgaggtcaggagttcaagaccagccgggcaaacagggcaaaaccctgtctctactaaaagtacaaaaattagccaggcatgatggcgggtgcctgtaatcccagctacttgggagactgaggcaggagaaccaggaggaggaggttgcagtgagctgagagtacaccactgcactccagcctgggtgacagagtgagactcatctcaaaaaaaagagaaaaacacaaagtggttattccatttcacattcccaccagaagtgaatgagagttctagatccatatgtccaacacttgttagacattctaaaagtatgtagtggtatcttgctgtaggtttaatttttatttatctaatgacattaagcatccttggctgggtatggtggcacacgcttgtaatcccagtactttgggaggccaaggcaggaggattgcttgagttcagaagttcaagaccagcctgggcaacatggcaaagccccttctctattttttttaatttttaatataaaaaaatttatacccagcactttgggatgccaaagtgggcagacggtttgagctcaggagttcaagaccagcctgggcaacatggcaaaaccccatctctacaaaaaaatacaaaacttagctgggcatggtggcctgagcccatagtcccagctactggggaggctgaaatggaaggattacttgagcccaggaggtggaggttgcggtaagccaagatcgcgcaactgcactccagtctgggcgacagagtgagacgctgtctcaaaaaatatatatatataaaattttaaaaagacactaagcatcctttcatgagcctattttccattcatatatatatttttggtgacgtgtgaattcaaatattttgcccatttttaaaattagtttattactattcataaaaatctgggtttcagatttttatgtttaattatctttttttcagatatttgtttaattatctttttttttcgaggcagggttttgctctgtcacccaggctggagtgcagtggtgcaatcacagctggctgcagtctcaacctcccaggctcaatcaatcctcccacttcagcctcctgagtaactgggaatacaggtgcaagccatcacacccggctaatttttgtattttttgtagagacagggtttcgtcacattacccaagctggtctcaaactcctgggctcaagcaatctgcctgcctcagcctcccaaaatgctgagattacaggtgtgaaccactgtgcccagccctcataaatatttccttccctcataaatattttcttcctcataaatatggccttcataaataatgtccttttattctcttaaaagcatatttcaaaagcattcttaatttcaataaagtttaatttgccaatttttttttttttttttttgagatggagtctcgctctgtctcccaggctggagtgcagtggtgtggtctgggctcactgcagccttcaccacctgggttcaagcaattctcctgccttagcctcccaagtagcagggattacaggcacacactgccgcgcctagctagtttttgtatttttagtagagacggggtggccaggctagtctcgaactcccgaccttaggtgatgcacccaccaaggcttcccaaagtgatctgtcaatattttgatttgtagcttttgtctttagtgtcctatctaacaaatatttgcgtaacccaaagattttctcctgtattatatttttctcttgaacttttttttttgtttgttttttaagatggaatcttgctctgtcgcccaggctggagtgcagtggcacaatcttggctcactgcaagctccgcttcccaggttcacgccattctcctgcctcagcctcctgagtagctgggactacaggcacccgccaccacgcccagctaatttttttttttttttatttttagtggagacggggtttcaccgtgttagccaggatagtctcgatctcctgacctcgtgatccacccgcctcagccacccaaagtgctgagattacaggcgtgagccaccgctcccggccttctcttgaacttttctagttctaagttttagaattacatccatgatctactatgttaatttttatatatagtgttagataagggtcaaagttaactttttgcatatagatatccaattatttcagccgtttgttaaaaatattttttttttttctgaattgcctttgccactttgttgaaaattaattgatcacataaatttgagttttttatggaatctccattctgctcattgacctatttatatgtcttgacactgatagcacatggtcttgattatcatagctttatagtaagtcttgaaatcagataagttttgtttgtttgtttgtttgtttgtttttgagatggagttttgctcttgttgcccaggctggagtgcaatggcgcaacctcagctcactgcaacctccgcctcccgggttcaagcgattctcctgcctcagccttccaagtagctgggattacaggcacccaccaccacgcccagctaatttttttgtatttttagtagaggcggggtttcaccatgttggccaggctggtcttgaactcctgacctcaggtgatctgcccgcctcggcctcccaaagtgctggcattacaggcatgagccactgcgcccagccgagatcaaatagttttaatcttccaactatttttttctcaaagttgttttgtctactccatgtcctttgcatttctaaatgaatcttagaatcagcttatccagatcaacaaaaaaagcctactgggatttgactgaaattccagggaatctgaagatcaatatagggcaaattaacaccttaaaaatatggtctttcaaactctatggatatggtgtatatttccatctacttagatattctgtaatttctctcagaaatgttttgtgcttttcatgagcaggccttgcacatctttggtcagattcattcctaagtgtatcatacttttgtgctcttttaaattgtttttgtttgtattttagaaacagggtctcactctgtcacctggctggagtgcagtggcaggatcatagctcactgaaacctcaaactcctggccacaagcaatcctcctgcctcagcctcccagagtgatgggattacaggcatgagccactgtgtccagactatttttaattttttaatttaaaacttatttaaaaattttaatttaattaaaatgtattttaaatttttagttttttgctaatatatagaaacataattgatttttgtctattgatcttgtatcctgaaaatttgcttattagaatagctttttatacattcgataggattttccatgtagacaatcatgtcaactgtgaataaagaccattctcttcttcctttccagtctggatgccttttatttctttttcttgcctattgcactggtttgaacctacagtacaattcagtgggagaatgggtggtcttttcactaaatgagtctgggtcaattagatactaatataaaaaaatgaatcttataaaccaaatagtatctgagataggtctcaatcaatttagaagtttatttttccaaggttaaggacttgagaaaggtccgtgcatttctccaaagatgactttaaaggcttcaatatttaaagggaaaaagcaggctggagggaaaacagggagggaatggtcacgttactaaatccacgtgtcgcaagagaaaaagagcacataagggagtgaatagtcaatcatgttattagtctcctgctcagtaaatcagcactttacataagataaggtgaacaaagcatagctacctgtggagatctttaaccttttatccacagctctctgcttaggaacaaaaggaaagttcgtttcttgcctgattcagctttcagcttaattttttctccttttggcattgtgaattatttttttctgtgtactctcacagaatggaatggcatagtgaattggggtcccaagtttctatttttctttcacaacctttacccctacctaacaccaaacacaaaatttaatttgagaagcatcatcgacctcaatgtgaaaggcaaaccaagaacactgttaaagaaaatataacagatcaggttaatgtgtaagcataggcaaagattccttaaacaggatgcaaataccaataaccatgaaagagtaataatttatagaataagtttcagttgtaaattaattagtaaaatgtgtgtacctcaaaaaacaccattaagaaggtgaaaaggtaagtgacgggccaggagaacacattgcaaaacatgtgtcaaagagccctagtaattgataagaaaaagactggacaaccaatttttctttttctttttttttttttttttttcttttttgagacagcgtcttgctctgtcacccaggagtgcggtggcgcgatctcggctcactgcaacctctgtctcctggattcaagcgattctcctgcctcagcctccccagtagctgggactacaggctcgtgccaccacgcccggctaattttttgtattttttgtagagatagggtttcaccatgttagccaggatggtctcaacctcctgaacctcctgacctcgggatccatccacctcagcctcccaaagtgttgggattacaggcgttagccacgcccaatttttttagaggaggggaggggcagaggcgtgccctgaccttcaccaaagaggatagccacaggccaataagcagaagaaaaggtgtttagcatcattagtccatttgcaaattaaaaccaggacagagatactgttgcagggcatgtggaccccaaaattggggcttaacccaggagggttcttggctttgcccagaagagaattcaagggtgagccggtggtgttagcaacttttcttgaagcagccgtgaataacagcagcagaggggctgctcctgcagagcagggccacccacaggcagtgtgcccagaggagcagctcagaggcagtgctgcagtcacgcttatacacactttaaattatatgcaaattaagggacagattatgcagagatttttagaaaaagcatggtaacttctgggtcatcaggtcatcgccatggaaagggatggtaacttctgggtggtgccatggcaatggtaaagtgacaggccacaccactgggtgtgtcttatggaaagctgcttctgctcagacactgttttagctagtcctcaatttggtccagtgtccaagctccacctgcagggttgagtcctgctccctgtcacaataccactacaaaccaacctgctcaaccccaccatggtgcaaccacttaggaaaacacacggcatctactaaagctgaacatattcactctatgacctagcagctccattcttagtatatatccaacatgagtgctatgtccaccaaaacacatgtatgataatgttcatagaagttttattcataatagccaaaaactggaaacaattcaaacgtccatcaacaatagaatgaataaatagattgtatccatacaatggaatacagtcgtgtgccacttaacgatggatatacgttctgaggaatgtgtcattaggtgatttcatcgttgtgcaaacctcatagtgcacttacacaaacctaaatggcctggcctttacctacctatgctatatggtatcgtctattactcctaggcccctaaattaattgcacaggatgttactgtactgaacactgtgggcaactgttacacagtagtaagtattggccaggtgcagtggctcatgcctgtaatcccagcactttgggaggatgaggcaggtggattgcttgacgtcaggagttcaagaccagcctgaccaacatggtgaaacgctgtctctactaaaaatacaaaaattagttgggtgtggtggtgggtgcctgtaatcccagctactcaggagggtgaggcaggaaaatctgaagccaggaggcagagattgcagtgagccgagatctgtgccactgcactccagcctgggcaacagagcaagactccatctaaaaaaacaaaaaataaaaaaaattaagtgtttgtgtatctaaacatatctaaacatagaaaatgtatagtaaaaatacaatataaaagatttttcaaaaggtacatctgtgcatgacacttacgatgatggagcttgcaggactgaaagttactccgggtgtgtgagtgaatgagtggtgagtgaacgtgaaggcctaagacattactgtacactactctcaactttataagcactgtacacttaggccacactaaatttattttttaatgtttttatttgttccataataaattaattttagcttactgtaactttataagcttttttaatgtttgacttttgtagtcttgtaacacagcttaacacattgtacagctgcaaaaaaaatttctttctttatatccttattccatgaatcttttctatttttattttattttattttatttttagtttttaatataaacacacacataagcccgggtctacacgggatcaggatcatcaatatcattgtcttccacctcaacatctcggcccactagaaggtcttcagggacaataacactcatggagctgtcacctcctgtgatcataataatgccttctggatacttcctgaaggacctgcctcaggctgctttccagttaaccttttttatataagtagaaacagtacattcaaaaataacaattaaaactattgttttaattggcacagtggctcaagcctgtaatcccagcccttggggaggccgaggttgggcagatcacctgaagtcatgagttcaagactggcctggcctacatggtgaaaccccgtttccactgaaaatacaaaaaattagctgagcatggtggcaggcacctgtaatcccagctacttgggaagttgaggcaggagaaccgcttgaaccagggaggcagaggttgcagtgagccaagattttgccactgcactccagcctgggcgacaaaagcaaaattccatctcaaaaaataaaatgagtacggtatagcacatacacatacaaaatgcttatgaaagaaatccaagacttgaataaatgaagagacatgccatgttcatggactataagactcaacacagtaaagacgacaatcagcccgaaaatgatatacaggtttaatgcaattccaattgcattgttactgaagataccgtttgctagagggcatgaagcttttaagtcggcgcagctcatgcacctgctcaatgcagatcttgtcttcttgtacctgagccctctgctgagttaactgctacaaagcttcctgctggtggaatgcctgattctgccttgctggtgtgtgtggttcctgccgtgagtccttctgaacaggccacttgaatcaatgttttttgtttgtttttgtttttgagatggagtctcactccatcacccaggctggagtgcagtggcaagatcttggctaactgcaacctccgcctcctggattcaagcgattctcctgcctcaccctcccaagtagctgggactacaggtgcatgccaccacacctggctaatttttgtttttttttttttggtagagatgggatttcaccatgttggccaggctggtttcaaactcctgacctcaagtgatccacccacctcggcctcccacagttctggaattacaggaataagccaccgcacccggcccgtgaatcaatgtttagttgaatataagaagaccccggtgagcattgcagagtggtggcgacagtaaactaaactttcagtccctacactccatttggccaatgaactatgagatgacagggataaggaaggaaatgtagacgaggctttgaatgcctcggtaggagggtccatttgcccagcccctggtatgagaagctctgcagcccacgatggggagcagatgtgggttgaaatgaaaccaaattcatgctaagaggagaaactgctcagtgttcatgaaggggacccgggtagaaacccacctgcggccgggctgtggggacggattcatgtctggctgggatgggtattgggggtggaaggcgaagacaacggaatgaccctgcagaccccgtgcttgggatgggactaccacttgacaaagcaggggaacggccagactcactccaactcctccaaactccaatttacgggcgagaaacgtttgggaacccccaagaccctgtagagccaaagcagacaggcaaggctacaatggcaacagtttagtaggatttggtgaaatcccattaaaacgttcaagaaagctctccgcgtgtgggaaggggtaacctaaacagcatccctgagtctgaaaagctatgggctaagggtgcacaagtcaattgaaccctgtgttggagtcggaccagtgtcctctgccgccatctagtggaaatacacaggaatgcggacattttctaaagtgacagattttttaagcagtcataaattattgtttattttaaaggtttaagccataccttaagactggataaaacccttcatttacatatggcagacagagggaaaatacactttttataaaatgcttaaacaactttcactgtagtaagttggtttggttaaaaactatcatgtgatatcatttgatgtaaaatatctaggccggaaaaaatgtatatatatctaggccgggcacagtggctcatgcctgtaatcccagcactttgggaggctgagacgggtggatcacttgaggccaggagtctgagaccagcctggccaatatagagaaaccctgtctctactttaaaaaaaaaaaaaaatagcggggtgtggtggcacacgcttgtaatcccagctactcgggagactgagacatgagaatcacttgaacccaggagggggaggttgcagtgagctgagatcgcgcctctgcactccagcctgggtgacagagtgagactccatcagaaaggaagagaagaagagagaaggagagaaaagaagagagaaggagagaggaaagaaagaaaaagaaagggaaagaaagaaaagaaaagaaaagaaaagaaaaaatgcttagaattcacggaataaaaggagtattgcatgcattataaaaactaatggcaaaaactatttcagttgcccagcatatggggggacatcccattggggaatagaaatagaaatacaaatcctgatgatcaccaaatgtactaacttgtttttttgtttgtttgttttttgtttttctgagacagtctcactatgtcacccaggctgaagtgcagtggtgtgatcatagctcattgcagcctcaaactcctgggctcaagcagttctcctgcctcagcctccccagtacctgggactacaggcgcatgccaccatacctggctaatttttttgtagagacagggtctcatcatgttgcccaggctggttttgaactcttgggctcaggcaatcctcctgcctcagcctcccaaagtgctggaattacaggcatgaaccaccgcacccagcctgaacttgtccttttttgttaaaggtgttaaccaaagtcttggaggtacaccactggcaaaagtttaacaaaatgcttctgcatgagaatctaaccttagggttagttccctgaaagcatgtgtcaactacgttgctaggcaacattgcttagagtaaaaatgatcattggtaccttgtacctggaatcaccaggtagtcgtatgtggtatttataccagtttttgctttctgagtgtggaatttttgtaactgggcatgtcccttgcagagaccctggaagctatgtttatggaattgttatgggatggtctcctgtgaggcatcgggcttttaaatcaggaacgctggaagcagtggctcatgcctataatcccagcactttgggaggttgaggtaggaggcttgtttgagcccaggagttcgagactaacatggggaacatagtgagactccatctgtacaaaaaaaaaaaatttaattagccaggtatggaggcatgcacttgtggtcccagctactggggaggctgaggcaggaggagcgcttgagcccaggagttagaagctgtgatgagccacgattgtgtcactgcactccagcctgggtgacagagtgagaccctgtctcaaaaaaattgatgaagccatcatttagggcagctctcctaaaggcccagtgtagatctcgcctgtctccttgtatctactgagtgaactgcatcaaggacactagattagaggaatgactacctgaaggaagccgctttgataacagctagggcccctgcgcttcatccttctaaatactctgaatgtgactcctggtcatctcgtgagtttgaataagcccaagaagaccactagtggggattgcataagttacatcagccaaaatgattcttcttttcttttcttttgagacagagtctcactctgtctcacaggctggagtgcagtggcccaatctctgctcactgcaacctccacctcccgggttgaagtgattctcatgcctcagcctcccaagtagctggcattataggtgcctgtcaccacactcagctattttttgtatttttagtagagatggggtttagcaatgttggccaggctggtctcgaactcctgacctcaagtgatctgctggcctcagcctcccaaagtactgggattacaggcatgagccactgcgctgggccctcttttgtcttctttaatttggaatgcttctttaactttttttatttttcctttcatgacatggacattttgaagagtacaagcctattgttttagtagaatgtccttcaatttcgctttgtctgatgtttcctcatagtcagattctgggttggggcttcccctactttagggaagtccactctgataccctccccaagccttgctctcaagttcacagccaaggggtcaaacccattggagtctgcccactgccaccttctggagcacaggttggcaaattttttctctgaaggaccagagagtaaatattttaggatttgcaggccaagtggtctgtgtcacaatttgactttgccatcgtagcctgaaagcagctacagataacacataaatgaattagcatgactatattccaataaaattttatttacaaaaaacaagtgaagggccagatttggcccctgactctaacccatgtcccagcccccaaaacctccagagttccatgcccaaacagcctccagtctgtttccagggtaggcctctctttcctgcatgctgtatcctgaggggcatcatattgccatgtgggtgtatgttttccctagactaagaggtggctgggttttgttttgctttgtttgagattgagtctggcgctgtcgctcaggctggagtgcagtggcacgatttcagctcactgcaaccgccgcctcccaggttcaagtgattctcatggccttgtcagccactgcacccggccaaggtggctgttttgagggcagatgtggatacacaagctgaagtgtctgcaagagtgcaggtgaagattcaaggaatcctcccaccgcagcctcccaagtagctaagaccaaaggcatgcgtcaccatgcctagctaattttttaaaaaatttttagaggccgggtgcaatgcctcacgcctgtaatctcagctctttgggaggccaaggcaggcagatcgcttgaagtcaggcgttcaagaccagcctggccaaaatggtgaaaccccatctctaataaaaatacaaaaaaaaaaaaaatagcctagcatggtggtggacacctgtagtcctagatactcagcagactgaagcaggaaaatcacttgaacccaggaggcagaggttgtagggagccaagatcacgccactgcgctccagcctaggcaacagcgtgaaactccatctcaaaataaataaataaataaaataaaaaataaaaataaaaataaattgttttggccaggcacagtggctcacacctataatctcatcactttgggagactgaggcaggcagattgcttgagcccaggagttcaagaccagcctgggcaacatggtaaaattttgtccctaaaaaaaaatttgcttttcctagctggcacaggccaggtgtggtggctcacggctgttatctcagcactttgggaggccgagatgggcagatcacttgaggtcaggagttcaagaccagcctggccaacatagtgaaacactgcctctactaaaaatacaaaaattagccaggcatggtggcacacacctgtaatcccagctacttgggagtctgaggcagtagaattgcttgagcccagaaggcagaggttgcagtgagaaaagattgtgccactggactacagcctgggtgacagagcgagactccatcttgaaaaaataaaaaaaaattagccaacgtggtgatgcatgcttttagtcccagctattcgggaggctgaggtaagaggattgcttgagcctaggagttcaaggctgcagtgagccgtgattgcatcactgcactccactctgggtgacagagcaagaccctgtcttgacaaaaaaaatgttttttaagtttttgtagagacagagtctggccatactgcccaggctggtctggaactcttgggcttaagtggtcctcccacctcagcctcccaaagtgctgggattatacgtgtaagccaccagcccagctacaattctaatttttcttttcttttctttttttttttttttgagatgaagtctcactctgtcacccaggctagagtgcaatggtgtgatcctggctcactgtaacctccgcctcccgggttcaagcgactctcccacctcagtttcccaagtagctgggactataggtgtgcaccaccaggcccggctaatttttgtatttttagtagaaacagggtttcaccacgttggccaggctggtcacaaactcctaacctaaggtgatccacccaccttgccctcccaaagtactgggattacaggcatgaaccaccgcacctggcctagaattctaacttttagacatttagacacatggtatgtcatctccatttgcactttgcccctgcccataatgcaaggggcagcctgtgtgaaagcacaaacgcttctcagaacagccttagccaggctggcctggtccccacagatgttcaccagggaagggagtctgcaggctggcttctatctccacatctcccctgggagagtccggagcaattcctgggccatgcctcccagcctccccttgcctgcagccactcagctcagcaccagaccccagccttggtgctcagcttctcaacaacagagcagagaagaccccaaactggccagttcctccgtcttcccaccctctacttctggaatctcttttctctttccttcttcctttttttaatatacatttaaggggtataagtgcagattccttaaatacatatatttcgtcatagtgaagtctgggcgtgtagcgtacccatcacccgaataatgaacaatgtacccaacaggtaattcttcaaccctcatccccctcccactctcccacgttctggagtctccaatgtctattattccactctgtatgtccatatgcacccattgtttagctcccacttataagaatacacagtatttcactttctgcttctaagttatttctgttagaacaatggcctccaggccaggcatggtggctcatgcctgaaatcctgcactttgggaggccgaggcgggtggatcacctgaggtcaggaattcaagaccagcctggccaacatggtgaaaccctatctctactaaaaataaaaaaattagccagacatggtggcccacacctgtaatcccagctacttgggagactgaggcaggagaaccatgtgaatctgggagacggaggttgcaatgagccaagatcgtgccactgcactccagcctgggtgacagagcaagactccatctcaaaaaaaaaaaaaaccaaaaaaaacaaaaaaaataacaatggcctccagctccatcccatgtggctgcaaaatacatgatttcatccttttctagggctgagtagtattccatggtgtacatataccacgttttctttatccagtcctccgctgatggacacttagattgatccatgactttgctattgtgaacagtgctgtaaggaacatacgagtgcaggtgtctttttgatatgatttatttccctttgggtatttacccacagttggtttgctggatggaatggtagttctattgttagttctttgagaaatctctatactgttttccataaaggttgtactaatttacattcccactaacagagtacaaacattcccttttctctgcatctttgccaacatctgttgttttttgtggaatgtcttttctttatagtcgatctaatttcctttaacctcttgatatatgaacaacaaattcatcccttgcggcagcattaagacctttggaggtttcctgctctcctctcattcactgaacacacacaccaccaccaccaccccactaccatgactaccccatctctgccatctgatcagcacagggcctgaaggcacattccctgtacccagagcactatgaagcaacacaatgttgtaggagttaccatcctaccaacactactgcacgctcacgtccaagatgctttggaattccagctaacaaagtaacaccaatatggtacccaggtcgcataagcactcaagtgtatccagaaagatgagcaattctttttttttatatatactttaagttttagggtacatgtgcacaacacacaggttagttacacatgtatacatgtgccatgttggtgtgctgcacccattgagcaattctttaaaatgtgatcccatgaaatatttctaacttttcacaatctcaaaaagtaagtgacagctattgctctaaatatcactttcaataatatagtacttgtagcaaggcatcctataattttaagagctacataatgtaaattacgtaatttacataattattataatatagtaactgttcttttcattattttgctcagtgtttttacttttatcctaaaattgctttccataaactccaaaagttgtttcttttaatactttcagtctctagagaaaaagcaattttatgaaagtgttttgcaataatatattgattaattactctatcattttatttgccaatagttaggcccattccttagcataatttacttatttgtctcttcattgactcaggccaccatcagaacacataattattcatgataagaagttgggcaaagcaggaattttgcacacaaagaggtagagccgaatcagatattgagtacattaatttcttttgtaactgggtgctgtaataagagagctgaggcttggactttaaaacttgtggtacaaatcttgacccagccgtcaaccacctcaagtcaagactatcaccttccccagcccttagtgcccccactatcgagagaggaacttggtgatactggttcctgtacaacacaggtagtatgacgatcaagtgataaaatgcttataagagagcattaataccagtgacatcaatgtgctagttgttatctcatgacatgcaaagtcttctcattggatcatgattcccaatactgtcatggcattgctttcctttgacagattgtgatggttggtttttcatgacaacttggctaggctaagggatgggcagatcactggtacaacattatttctgggtgtgtctgtgcagatgcttctggaatagattagcatttgaaacaggtgactgagtaaagattactctcacccatgtgggtgggcatcatccaatctattgagaccctgaatagaacaaaaagacaagaggccaggcatagtggttcacatctgtaatcccagcattttgggaggccaaggcaggaggattgcttgaggccaggtgttcaagaccagtctgggcaacagagtgagatcttgtctctacaaaaaatttaaaaattagtgtggcgtggtggtgagatgggatttgttcccttgaccttcacccccttcatgggcgagaactggagtggctcatttcgctcagcctgccgctggccactccttgcaagagggagcgtgtgagcaagcgagtgtgggaaccagagggaacaaacgctagaaccaagttctggcgggagcaggctctgtatgggcctcacagcagcatccaagcccctgcccttttcgcacccaggttcttgtccggcatccaggaaggatcaggttgcatgaacggattgaagggtagcatatgtggggtatcttactgggtgatggaagtggctctcagagggatgggaattggaaaggggatggtgcgggaagaaggtgatcttcccctgaagccacaccatctgaagttagctgtgtcttgcagagatccagccactgcactccagcctgggcaacagagcgagtctccgtctcaaaaaaaataaaataaaataaataatttcaacagaattattaaagatgttaaatagccaggtgcagcgattcatgccagtaatcccagcactttggaaggctgagacagcaggattatttgaggtcaggagttcaagaccaacacagaaagaccctgtctctaacaacaacaaaaaaaaatttagccaggctcatgttggtgtgtacttgtagccccagctactctgaaggctgaggcaggaggatcacttgagatcagaatttgaggccacagtgagttatgactgcactactgtactccagctcaggtgatagacagcaagaccctgtcattaaattaaaaaaaaaaaaaaaaagatgtaaagtagagggtggacccaaaggacaaatactgtaggaccaataccacttatatgaggttcccagaggggtcagattcacagccacagtaggcaagatggtggtttccaggggctgggggaaaggggaatgaagagttattgtttaaattggtactgaattttatttgtgtgtttgtggctttgttttttgtttttgctttgtttttgttttgttttgttttgttttgagatagagtctttgtcacccaggctggagtgcggtggcatcatcttggctcactgcaacctctgcctcccagattcaagtgattcttgtgccttggctgccccagtagctgggattacaggtgtgcaccatcgtgccaggctaatttttgtatttttagtagagacagcatttcaccatgttgcccagactgatctcgaactcctgagctcaagcgatccacccgcctcagcctcccaaagtgctggccgtgcctgactggggatagaattttagtttggggagatagaaaagttctggagacagatggtagtcatggttgcacaataatgtgaatgtatttaatgccactgaactgtacacagagaagtggttaaaatggtgatgtttatgttatgtgtattttatcatacgcacacaaaaataaagggtagcagtaatggacgaagtgaagcagaggctgacggggactggaatggccatggaggggaggtggagaggggaatagcagccaagcagggagcaacccatactttgggaccaccaagtggctcatgccccataaattcccagtagagcaaagggtagaagtaagacatggagtggaatcttcctacaccctgaccctcacccatctcacacagcagccatgtagtagcttgacatgcacccgccccagaaaagttgcaggggttcttctgttaaaaaaaaaaaaagaggctgggtgcggtggctcacacctgtaatcccagcactttgggaggccgaggtgggcagatcacttgaggtcaggagtttgagaccagcctggccaacatggtgaaaccccgtctctactaaaaatacaaaaattagccaggcgtggtggtgcacacctgtaatcccagctactcaggaggctgaggcaggagaactgcttgaaccagggaggtggatgttgcagtgagccataatcgcaccactacactgcagcctgggcaacacagcaacactctgtctgaaaaaaaaaaaaagcaaatgtcttaaaacacccacaatctgtcattggaggttcaccaatgtctagagaatggcttccttcctgatcaccctaagtgaagtcctccagtgaatgagtccactaaaaatacagaggccctcaacaaatgatttatgacatcgttctcacatacattccaatatggtgactttgatgaaagtctccaacatgcaagactcacactaagatatgcaagcaaaaagcaggacgaggaggcagggacatcttcatgctatgtaactgtcagcacagccaaacccacgcatagtcagaaccagtagcacatgtgcataacgggcccaccctaccatgcacacagcctggacagcaggcctgcgtggagcaaacaaagataactcaggaatagaaaagaactttaaaatatctctatgtacttggcctgtgagctaaatctgcatttatcatagctggaaatcaatagacaatctccaaaatggatgaatcaagaactggtgataatgggatactactcagccattaaaaaaaaagaaattgtgtcacttcacatgcaaccccagcactttgggaggccaagatgggaggattgcttgaggccaggagtttgagaccagcctggacaggagagggagacctctgtctctaaaaaaagaaaaagacatcatgtcttttgcagcaacatggatggaactggaggccattatcttaaatgaaacagctcagaaacagaaagaaaaatgctgcatgttctcacttgcaagtgggagccaaataatgtgtacacatggacataagtgtggactgatagacactggagactaggaaaggtgggaggctgggaggagagtggatgatgagaaatgaacaggtacaggttgggggcagtggctcatgcctataatcccagcactttgagaggcctagttgggtggctctcttgagcccaggagttcaagactagcctgggcaacagggcaaaaccctgtttccacaaaaaatacaaaaattagctgggtatggtggtgcatgcctgtagtcccagctacttaggaggctgaggtgggaggattccttgagtccaggaattccaggctacagtgagcagagatcatgccactgcactctagcctgggccacagagtgacagcctgtctcaaaaaaaataataaaaacaaaaaataacaggcaaaatgtactttattcagatgatgggtacactaaaagccctgacttcaccattattcaatagatccatgtaacaacactgcacttgtacccctaaaattaacacaaatttaaaataggaccaggtgcagtggttcaggcctgtaatcccagcactataggagacagaagtgggtggatcacttaaggtcaggagttcaagaccagcctaagcaacatggtgaaagcctatctctactaaaaatacaaaaattagccaggcaaggtggtgcatgcctgtaatcccagctactcgggaggctgaggcacaagaattacttgaacccaggaggtagaggttgcagtgagcctagatgggtgacagcgagatccatctcaaaaaaataaaataaaataactagtgatgtaaccctattatttccatgcaacaataaccaccaggagaaacagctgaaggaactaaatatggttgcctccataggaccacggctggggagagagaggccggaatgatctccatgcatcataaaccctcctgcataatttgattgtttaaccttatgcatgtattagtgatactttgatttttaaaaaaattgttccaaagaaaatgactagaaggttttttctcctacagcactgtttcattctggaatcttccaattaagcttttggctaaacacataaatatgataatgatgattattcaggaatcagaaggtttgtaaaaacattgtaccattagagtaatcaagctctgctctaacacatcttggctttttgggataattagaccacactggaggcccagatggggtgaatgagaaagccatgggtatctgccacagagtaacaagaaaaccgtacacaaacctactcagctggtagtttgaaatctgcatgttaacttagtacacaaggagaaaggaataaaaatacttggatttagggcaaaacatttcactttaaaaactaagcatagaacatgagtgcagtaattaatgtcctacataacttattttaagcccttgtgttaaaattgactcttttgggtgaggggaggggacaggtctcactctgtcccccaggtaggagtgcagtggtgcaatcacagctcactgcagcctcgacctcccaagctcaaatgatcctcctgcttcagccccccaagtagctgggactacacacatgcaccaccatgcctggctaatttttgtagagacggggttttgccatgttgcccaggctgatctccaactcccgggctcaagagatctgtccgccttagcctcccaaagtgctgggattacaggcatgaaccaccaggcctgacctaaaacaaaatctttaaagctagaagtgatttcttctatacgttccattttttaaaaaattcacctcctactgtgagcacaatacaaaaaaaaaatttaacctattaattcatctaaccaagatttattgtgttcctactctgagccaggtcaagttggcactaagaatgcaatggtgagaccaggcacggcagctcatgtctgtaataccaggactttgggaggctgaggtgggtggatcacctgacgtcaggagttcgagatcagcaactatctcagacagcagatctcagcagtgagaagtctcccgaactgaaaaatatctaggctgagctgcagtgagaaggcttgacggggagaatctgggagaagtttcatgtggtttctggaatacaggacaaaggcttggaggggcgaggcacagtggctcatgcctgtaatcctagcacttgggaaagcggaggcaggcagattgcctgaggccagaagttcaagaccaacctggccaacatagtgagactcacctctctatttatatttaatcatattatatgataatgaaatggtttggacctgtattcccactcaaatctcatgtcgagttgaaatcctcaatgttgtaaggggggcctggtaggaggtgatcagatcatgggggtggtttctaatgggtttgcaccatccccctagtgctgatctcatgatagagttctcaagagatctccatggctgtttaaaagtgtgtgagcggtggttcctgcctgtaatcccagcactttggtgggtggatcacttgcggtcaggagtttgagactagccttggtaacaagatgaaaccccatctctactaaaaataccaaaattagctgggcgtggtggtgggcacctgtaatcccagctacttggcaggctgaggcaggagaatcgcttgagcccaggaggcaaagattgcagtgaaccgagattgcgccactgcactccagcctgggccacagagtgaaactccatctcaaaacaaaacaaaaattgtgtgacacctccccccaccattatttctgctccatccacgtaagacacgcctgcttccccttccccttccatcacagctgtaagttccctgaggcctccccagccatgcttcctgtatagcctgcagaaccatgagccaattaaacctcttttccttataaattacccagcctcaggcatttgtttctagcactgtgagaatggactaataccgacaatataaaaaatatttttaggccgggagtggtggctcaagcctgtaatcccagcactttgagagggtgaggcaagccgatcacctgaggtcgggagttcaagaccagcctggccaacatggtgaaaccctgtgtctactaaaaatacaaaaattagctgggtgtggtggtgcacatctgtaatcccagctacttgagaggctggggcaggagaatcgcttgaacctgggaggcagaggttgcagtgagccgagattgcaccactgcattccagcctgggtgacaaagcaagaatccatctcaaaataaataaacaaatattattaagttaaggcttggagggagtagagagacagaagcggggaaggtaaacgggagagacaaaaggcgagaccagagatttaagcaagtgccaactcacacaggattttgtaaacaacataacccaggatattccaagagaaaagagcaaggagaagctattaaagccattgaaggctttggggatggggggaagtacaacagactgaatgtttatgttcccctaaaattcataaattgaaatcttagccctcaaggggatggtattgggaagtggggcctttagaaggtgactaggtcatgagggtcaagccctcatggataaaattagtgcctttagggtcgggcgctgtggctcatgactgtaatcccagcactttgggaggcctaggcaggcggatcacctgagatcgggcattcaagaccagcctgaccaacatggacaaaccccatctctactaaaaatacaaaattagccaggtgtgatggcgcatgcctgtaatcccagctattgaagaggctgaggcaggagactcgcttgaacccgggaggcggaggttgcggtgagtcaagatcgtaccattgcactccagcctgggcaacaagagtgaaactccgtttcaaaaaaaaaaaaatttaatgcctttataaaagagattctggccaagcatggaggctcacaaatgtaatccctgcactttgggaggccagactgggagaatcacttgagctaaggagtttgagaccaacctgggcaatatggtgaaacactgtctctattacattttttttttttttaatagcagggtgttgtggtgaatgcctgtagtcccagtgactatgcacgaggctaagacaagaggattgtttgagcccagaagtttgaggctgtcgtgagccatgatcacaccactgtacttcagcctgggtgacacagcaagaccctatctcaaaagagagagagacggccaggcgcggtggctcatgcttgtaatcccagcactttgggaggctgaggtgggaggatcacttgaggtcaggagttcaagaccagcctggccagcatggtgaaaccctgtctctactaaaaatacaaaaattagctgggcctggtggtgcatgcctatagtcccagctactcaggaggctgagacaggagaattgcttgaacccaaaaggtagaggttgcagtgagctgaggtggagccactgcactccagcctgggtgacagaacgaaactctgtctcaaaaaaaagagagagagacccagagagatcccttgcccctttctccatgggaggttttagcaaaaagacagccatctatgaaccaggagacagtcctcaccagaaactgaatctgtcagccttaatcttggacatcccagcctccagaactatgagaaataaatttcttttgctgataagccaccggtgtgtgatattttgttacagcagcccaaatggactaagatgtggggtgggcagggagtcttgagggacaggtttggcatcatcaaatttgctttagaaatattattttcaggctgggcgtagtggctcatgcctgtaatcccagcactttagcaggccaaggccagaggatcacttgaggtcaggagttcaacaccagcctggccaacatggcgaagccccatctctactaaaaaatacaaaaattagccgagtgtggtggcacacacctgtagtcccagctactctggaggctgaggcaagagaattgcttgaacccagaaggcagaggttgcagtgagccgagatcgcaacactgcactccagcctgagcaacagagagagactctgtctcaaaaaaaaaggaatttttctttactcagaaaaattaattatagattagtttccattattttgattactttccaatcatacatatcttatcaatttctattgttcgttgttagggtagttggacaaatatttgagaaacggtaaggataataaaactaattgtagaatgctattaagtttacaaagcacttagtcatgcttttactgcatttacttaggaggcagatggtatagacagatttgcacctggtgccaccattcttctgccctgtgtccatggaaggcactggtaattgatcacggtacaagctcctgatgtctcagacacaatctcagaatccttctcaacacaaatttccaggcaagcagtgtcatctgcttaagttgtcacttgatgaaaaattatatttgccatcctaaaatggtttaaagcacccacattgtggaattataacaacttgattgaaatccacgacttccaccttaatactagatctaagttacttgacttctgcttttgagttgggagggtgtgtgtgtgtgtgtgtatgtgtatggtttttgtttcattttttttttgagacagaatctcactctgttgcccaggctgaagtgcaatggcgtgatctcagctcactgcaacctctgcctcctgggttcaagcaattcccctgcctcagcctcctgagtagctgagattacagacatgcatcgccacgcccagctaatttttgtattttagtagagacagggtttaaccatgttggccaagctggtctcgaactcctgacttcaagtgatccacccgcctctgcctcccaaagtgctgggattacaggcatgagccaccttgcctggctggttttcgttttttgtttttgggggttttttttgagacattctcgccctgttgccaaggctggagtgcagcaccacgatcacagctcactgcagccttgacctcttggtcaagtgatcttcccagctcagcctcctgagtagctgggactactggaatgtgctaccacgtacaactaattttgttttatttttgaagagccagggtctcactatgttgcccaggctggtctcgaactcctggactcaggcaatcctcctgcttcagcctcccaaagtgctgggattacagtcatgagccaccatgcccagctagttttctcattttaaaattagacataaagacatgtaacagagggctgctctaactaaattaagaagcagcaaactatgaaattttaccatctatgtatttaactataccaattcaacgatcctgccttggcaagagagagtaagagaaagataggaattagtaacaattccactcaatgtgcatgcaccccagagcacgtatgggatgggcgacaccttccctagcaatggttattagtctcagtttcagagtgtctctcacagaataagaggttcacccagtgagagtgggtctgttgttcgaagggacatattttccaaaacacatggcccccaaatgcaagccaagagcattatatattgcttaaatgaaggaccagcagtctatctctagagaaaaaaaactagctaggaggtcctccctaaggatataacagatatgttcctaatggatttaaatatggccaaaggctgggtgtggtggctcacacctgtaatcccagcactttgggaggccaaggccggtggatcacctgaggtcagaagttcaagaccagcctggccaacatggcgaaaccctgtctctactgaaaatgcaaaaatgagccaggcatggtggtgcatgcctgtaaccccagctactcgggaggctgaggcaggagaattgcttgaacctgggaggcagaggttgcagtgagcagagattgtgccactgcactccagcctgggcaaaagagtgagactccatctcaaaaaaataaataaataaaataaaaattaaaaatgaatatggccaaaaaaatctttcaaattcctcttccaattaggctgtaaatatctaaataagccaccagttttgctgtaaagatgggggaaaacagataaagtaaaatatcatactgatttttcagatgtctataaaatagtctaaaggaactaaattctagagaaagaggacaaggcttcataggtaggaaaaattagggatcattgggggcatttgccaagtctgggcatgggcaggcagaggatgggccctgccacagaggatggggctctccttggctaagaagaaaccactgattctttaaacatctctacgggctggagcaacagatggaaatatctaagaactcaaaacacagtgctagtcttccatttttgctaagtgggttacagtgcaggaggctgggtcttctgtcttcctcattgaaagacagacagaaaactccactaattcttcatgctcaggtccaaaattccactagaagaaggggcccacaagacacgcagatcacatcttgcccttaagacatttaaaatccaggtgaacaaaaactaactaaatctgcaattcatccaaccccaattcagctccactgttgattggatctgactgatcaagctcctcatcctaattgactggcaagaggaaagggcttgccctctccagggaaaaaaatatttacttccgtcactttggttctttacaatgtctagaatacagtatctagctagacacaatatctggcataaaattaaaaattatgagatgcaaagaagcaggaaaatgtgatgcataatcaagagaaaaaacaatacatgcagattcttatatgattgagatgctggaactcacagataaggactttatgataattactataaatatgttaatgaaattagagcataaaatagacaaaatgataagaagatgaagattttttttttttttttggagacagaatttcactcttgtcgcccagacaggagtgcaatggcatgatctcggctcactgcaacctccacctcccgggttcaagcaattctcctgcctcagtctccccagtagctaggattacaggttcctgccaccacacccagctaattttggtatttttagtagagatggggtttcactgtgttggccaggctggtcctgaactcctgacttcaggtgatccacctgtcttggcctcccaaagtgctgggattacaagcatgagccactgtgccaagccaacaagatgcagattttcaacagaaaaatacactctctttaaaaagatagctggacgtggtggtgtgcacctgtggtcccagctacttgggggcgctgaggtgggaggatcccctgagcccaggaggttgaggctacagtgggctgcgctcgcaccctatactccatcctgggtgacagagcaaaagcctgtctcaaaaaattaaaaaagagagaaatccattaatctggggatcaagtgtactaacactaaggtgagatgcaatctcaggataagactttggagtattgtttaccatatatacattttgtttgtttgtttgtttgtttgtttgtttgaaacggagtctggctctgtcacccaggctggagtgcagtggcgccatctcggctccctgcagctccctgcttcccaggttcaagtgattctcgggcctcagcctcctgagtaactgggataacaggtgtgtgccaccatgccctgctaattttttgtatttttacagtatctcattgtgttggccaggctggtcttgaactcctgacctcaagtgatctgcctgcctcggcctcccaaagtgctgggattgcaggcataggccaccacgcccagtcactatatctaatttttactggtttccagaaagaactaatcgtgctgttccaagaagtgaagttagccaacaggatctacttcctctttcaatccaaggccacgctcctcccagacaaccccagccaacgacagaacacaacaggggtactagggcctaaccatttctgttccaaagagccatcttcactccagggcttcctgttgggttggccaagacgttgtcagatctgcagtacggtctggggctctccctgctcaatcctgcttcttctccgttttacctttctcaggcattacctccaataaacctcttaactctggctcagcatctaattctgagaagaaccaacagacacacatggctttagaactcaacctgtggactggcctcccaaagtgcctgtaatcccagcactttgggaggccgaggcatgtggatcacttgaggtcaggagctccagaccagcctggccaacatggtgaaaacccgtctctactaaaaatacaaaaattaggtgggtgtggtggtgcatgcctgtaatcccagctacttgggaggctgaagcacgagaatcgcttgaacccaggaggtgtaggttgcaatgagccgagatcatgccactgcaccccagcctgggccatagagtgagaccctgtctcaaaaagaaaaaaattcaacctgtgtaagatgtgtctcctccaatgtgtgtaagatgactgacccaataccaagcacaaagtagactttgtgtactttacaaagtatacaataccagtagatgttagatatctttgccttttgcatcatttaggatatgtgtttgctggtcaggagagactcaaaataacactgccacaaatagtgtcacaaaattcctggacttctagctgatcctgtgaaatagtcagataagtgagtaaagccatcttggaccctctagaccaggcaagctgccctcaatgattccagttgaggctacacggaactgaattgcttagtcaagcctgatccatgaaattgagaggtataataaagtgataattgttttaagtcactgaatttgggggtggttcctataaacagaacacatctcctaactaatacagagacaaaaacttaccttaaaagtttatatctaggccgggcatggtggctcacgcctgtaatcccagcactttgggaggccgagacgggcggatcacgacgtcaggagattgagaccatcctcgttaacacggtgaaatcccttctctactaaaaatacaaaaaattagctgggcatggtggcgagcacctgtagtcccagctacttgggaggctgaggcaggagaatggcgtgaacccaggaggtggagcttgcagtgagccgagatcgcgccactgcactccatccagcctgggcgacacagcgagactccatctcaaaaaacaaacaaacaaacaaaaaattttatctaataccatggtaccatagcatttggaaattactgctttcctcctttattttcatatgttgtttgttttttttccttttaagaaagtctttatactcacacaattctgtattcagcttttttacttacatattatttcaaaagcaagtgcctgtttttgctacataaacttagtttttaatagggccattttacatggaaagtttgcctttttgagatagaattcacatatcataaaattcactctttttttttttttttttttttttttgcgatggagtcttgctctgtcgcccagactggagtgcagtggcgtgatctcggctcactgcaacctctgcctcccaagttcaagcaattctcctgcctcagcctcctgaggagctgggattacagacgcccgccaccacgcccagctaattttttttgtatttttagtactacgttggtcacgttggtctcgaactcctgacctcgtgatctgcccacctcagcctcccaaagtgctgggatcacaggcttgagccaccgcgcccggccctaagttcactttttaaagtatacaatttagtgggttttcgtatatccacaaagccatgcaaccattatcattatatacttccagacattttcttttttctttccctttttgagatggagtttcactcttgttgtccagactggagtgtaatggcactatcttggctcacagcagcctccgcctcccggattcaagctattctcctgcctcagcctcccaagtaactgggattacaggcgtgcgccaccacgcctgactaatttttttgtgtttttagtagagacggggtttcaccatgttggccaggctagtcttgacctcctgacctaaggcgatccaccagcctcggtctccgaaagtgctgggattacaggcacaagcccctgtgcccatcctacttccagacatttttatcaccccagaaagaaaccctgcgccccttggtagtgacttcccattcctactcctcacccccatgtcccagccccttgcagccactaatctactaatattttctgcctctgtggatttgcctgttcttggtgtttcttttttttttttttttttttttttttttgagacagagtctcgctctgtcgcccaggctgcagtgcctctcgagtagctggaattacaggcatgagccactgacagtgagcttatcctttttccatctgtaacaatttccaaatgtacacctccatttcagatctcctgacttttagggtcataccaattatgaaatagacgcaattgcttggtgtcccaacaggcacttccagctcaacaagtgcaaaattatttgcatctattagtatttccatcctccccccaaataaacttccttttatccgttctccttatgctcatcactagccctaggactgacctaggtgttcagtcctggaactaggagtccttatctggctacacccaatcagtcaccaatctgttagattctactttatgttttgcaactcatggtttcctgcaccctagggcggcaggaactatgtataatgcagctgatcagttggtagcccctagtgtaatatgcacattaatctccgtttcatgtactagaaacaaggttgagaaccgtgacacattttatgaccatcgcaggcttcctaaagatccaaaatccattgttgcttccctgcttaagagctcccggcaacctgcagaaaaactaaattcttccccattcatgttttcagcagtagaagctctagaatttctacacttgaggagctatggggtaagaaagaagatctggaggatttgcgaggcttgtccaaagcaattcccagctagtacactgttttttccttatatttgtctttactttatgaggctaggggatggctgttggacaatatgggagaaacaaagccctcaaccctcaccacctttggtgtggccactgctatccactataactcctaatatactctgcattctttaggctgtggccacactgaattgcttactttccagaatgcatctcactcttcctcctgtaatcactccatctcctgtttgatctgaaagcttcttaatcccatctctatttcaggcaagatttgaagtccccctcataccatagacaaaaattggctcaaaataaatcaaagacctaaatgtaagagctaacacataaaacttagaagcaaacattatgggtaaatatttgtatcctggattaggcaatgctttattgcatatgacaccaaaagtgcaaacaacaacaacaacaaaaatgaataaactggactttataaaaattaaaaacttttgtgcttcaaaggacactatcaagaaagtgaaaagacaaccaatccgctgaataagagagactatttacaaattatagatctgattagggacttgtatctagaatatataaaagaactcttgccactcaacaataaaaagaaaaattgcccaatttaaaagtgtttagctgggtgtggggctcaacgcctgtaattccagcactctgggaagccaaggcgagaggatcacttgagtccaggcatttgagaccaacctgggcaacatggcaaggccctgtctctacaaaaaaatacaaaaattatctgggcatggtggtttgcacctgtggtcccagctacctgggaggctgaggtggaggattgcttgagcccaggaaggttgcagtgagccatgatagggccactgcattccagcctggatgacagagtggcaccctgtctcaaaaagatacacaaatggcggggtgcggtggctcacgcctgtaatcccaccactttgggaggccaaggagggcggatcacctgaggtcgggagtttgagaccagcctgaccaacatggagaaacccccactctactaaaaatacaaaattagccgggcttggtggtgcatgcctgtaatcccagctactagggaggctgaggctggagaatctcttgaacccgggaggcggaggttgcggtgagccaagatcacgccactgcactccagcctgagcaacaagagcgaaacaccgtctcaaacaaacaaacaaaaaaagatagacaataataggtgttggtgaggctgtggagaaaattggagccctcatacaattgccagtggaaatgtaaaatagtgtagctgctttggaaaacagtttgacagttcctcaaaaagttaaactctgagttaccatatggctcaactacttcattcttaggaggattgaaaacacatgttcccacaaaaacttgttcatagaggtactcatggatatttataatagcagaagtgaaaacaacccaaatgttcatcaactgataaatggataaacaaaatatggtatgtccatacaaagggatattatttagccttgaaagaatttccgggcacggtggctcacgcctgtaatcccagcactttgggaggccaaggcaggtgaacacttgaggccaggagttcaagaccagcctggccaacatggtgaaacccatctctactaaaaatacaaaaaatcagtcaggcgtggtggcatgcgcctgtaatcccagctactcgggaggctgaggcaggagaatcgcttgaacagaggagacagaggttgcagtgagccgagatggcaccattgcactccatcccgagtgacagagtgagactgtctcaaaaaaacaaaaacaaataattcaacttcctcgcatggaccttgtactgaaacagggatttccaaacctttctttgtagccactgtgcaccagccccatcagagctctgtctctctcctgtgtccctctcttatgatgccaggcttctcgccatttgctcactcagctcaccgtcctgcctgtgctctgccttcatcctgctgttcattcatgcagcaaatattaactgagcagctgccctgagccacgtgctgttactaggcccctgatgatacggcagcaaccaaaacaacatcactatctcaaaatgtttacattctagtgaaggagacagatacatacaaataattaaacagacatacttgagagagatacatgctataaagaaaatacaagctgagttaaggagatgagtggtattattttaaacaaggctgtcagggacgtcatctctggaggtgatgcttgagcagagactggaataaagtgctcaagtactggttgaattagacgcgactggaacagaacgagaagctaaatcatgtatatccttagacaccaaagtctggttttctctctgtgtaacatgggatcagtagagtgagtagaggaaggacatgatctgagttagatttttttttttttttttgagacggagtctcgctctgtcgcccaggctggagtgcagtggcacaatctcggctcaccacaacctccgcctcctgggttcaagcaattctcctgcctcagcctcccaagtagctgagactataggcgcgcgccaccacgcctggctaatttttttatatttttagtagagacggggtttcaccatgttggccaggctggtctcgaactcctgaccggtgatgcgcccgcctcgggcccccaaagtactgggagtacaggcgtgagccactgcgcccagccctgagttagattttaagaagatctctctggctgctgtattgagaataaagtactgggggcaagagttgacacagaggcaacttttagaaggctactgcaataattcagcccgagtaatcgtggcttgtgggagaagtgtaggaatggagatgagaagtcagatttaggatatattgtgtatacataacggagaggtgtagtcagaacagatgtggaagcaagacagggcaaggctgactcacggcttttagtctgagcagctgagtaaaaatggtaccgtttacatcaaatagggaacggtggtgaaggagcaggttagaggggaaacagggagcatggctttggacccttaacgtttgagattcgacagaaaccctggttcacggaattgatccaagctacatactgataattgggattagtgagttacaatggcgttgcaagccatgaaactggttcagaccggctgaatgagcgggacaggaaggggctgaaacacttgagtccttgtgagagccccagctccaggggcagcctcgggggaagctccccgggcgatgactgcggtaatggagccgtaggagctccacgaggtgcaggttcagcgtcttagaaggatgagcagcggctcgccacagctcggaggcgggtgggcagcgctccaggccgagggccccgcgtcggcaaagacacaggacccacgacaaggcggccacggcctgagtcaaaaggaaggccgcgcgcctcctctccagcccgcagcaagcgggtgccacgaggcactcagccggtccccgaagttcctctcacgcggccccaagaccaccaccgtagtccaggccaacaagcgctgccgggactcccgaggccacgaatgagccgggagccaccagtagccggccaagtctcgcgagagcgcggcctcgccctcccagcatgccccgcgccgccgccgctgccgccgccgccgccgccgccgcgccgcggcttgagggcgggaggctgggggagggtagcggagccggcgccgccgccatgttgggtctgaagcggctgctgtaggcgccgacggagcgagcgggcgtgcggagcgggcgacagtggcgtgggatctgcctctctgcgagcagctgggagcggcggcggcggcgccatgagcgggggcaccccttacatcggcagcaagatcagcctcatctccaaggcggagatccgctacgagggcatcctctacaccatcgacaccgaaaactccaccgtagcccttgccaaaggtacgcgggaccgggcctcagggtgggggccgagccgggcgccgctcggggctgctccccgctccggcccgcggcctcctcgttccctcccctccctccgtcgagctccgggaggcctctcgcctcccttctccgggccccggcgtcgcgggccggaccgcggcctccccgcggctccctggtttccgccccccggaatgtccgcgcctgaagcccggggaactacgggactgagtgcgcggcgggcggccctgaagtccgagaacgggccggagaacacggagaaacgcgtcttccaactccgaaattcggggcttctgccgtcttagcacaaaacaaagccggagtattcaaagaatttttccgcccagcttgagttcatcgcggatgcgttgactacacagcacccattttctcactttgttcatttcaattcgtggcgatcttcctctggtgaactcttgagtaatgtgctaaaactttgggtttgctctgcgacgcagacattctcgaaatgccatcgatgccgtggagcagatcccatctccctcggctcatcctctgttggtatttacctgttaaaccggaatcctcaaagcctgttgtgcaaccacctcattagggcgcgtggtaaaaatgcttgctgctgccccgacgcccctgtttctggaaacgggttcaagcttgatccaggatccttcttgaccaggcaagcttgacctttgatccaggctcagtgggcgttgactgatccctctggaggctctctgggaaagggaattcggccgagaaggaaggtgcccctacccacagtgttaatatttggcatccctagagtctgtgtgggttttgtttccgttcacacgtgcagggcctttgctccgccaggaaaccagaaagaaaataaactttagctcctgaatcttaaaggaaatctcacaacagtgtaaaatactttgagggaagctagataacctaggtgattttcccagcacttctggtagaggtgggaactgcatagcatggttagggaccctgtggataggttaggtccaaggataaagaagaagattttcgaaatctgtaaaattttaaaaatcgttaacagataggggagtggtttcacgggatcaagtatttaataatatttcttggatgctctggtaaatcctttatttatttatttatttatttatttttctaagatggagtttagctctttttgctcaggctggagtgcaaaggcaatgatttcggctcactgcaacgtccgcctcccgggttcaagtgattctcctgcctcagcctcccaagtagctgggattataggcgcctgccaccacccctagctaatttggtatttttagtagagacggggtttcaccatgttggccaggctggtctcgaactcctgacctcaggtgatccacccgcctcggccacccaaagtgctgggattacaggcatgagccaccgcgcccagcctctggtaaatctttttaatagccctggtgttgggacaaatcttatacctgggtagggaaccttttgatgttacagaactgtacaccataaaggagtagtatgagatggtgatagttgcacaactctgcaaatttgctgaagatcattgaattatacactttttaaaatcaccaagtctaattttaaaagtagtatgaaaaaccagggagtacccccacatttccctcttcaccttgtgaaacattatgcagtgacacattacctcattaaaacacctgtagacttggcggttagaaatcggctataggatgtatgatggatggtatttggtgtttattaaagactttcccagtgatgcttcttaagtaacttagtttttgcttggccttattttgaatttatttttatattttttatacaatagttacttagctgtatagtgtttttctggctttttgaaattatgaaaaagcctctctttatgaaattatgaaaagtgctgggtgagagccagatatgggttgaaaataatttctcattaaagtggtttaataaatttgttttaaagtattgctttacctaatctgaatttaaaagtgtcttgccagcttagtgactcaataagttggctgtgttacctttattcctcacaaagaaaaaaaatacatttgaaaattttaaagtatttttgttcttttttaaaaactacgaacatatccttttatgcaggaaccccaaaagtctacattttaacaacccacattttaaaaaacttttcagcagcttttagagtcagtatttcattagtctgtaatagttaaattcatatgacataatgacataaaatataaatttgttctttgtgtcatgacttgataaatatatgaatatagcagtgaaaaatttttttaatcattgaatttatgtttgtactcatggctttgatatttcatcccacatcattatatgctttttctttttcttttttttttttctttttgagatggcgtctcactctgttgcccaggccggagtgcagtggcacaatcctggctccctgtaacctctgccttccaagttcaagcaattctcctgcctcagcctcctgagtagctgggattactggcgcgtgccaccacgcttggctaatttttgtattttttagttgagacaggctttcaccatattggccaggctggtcttgaactcctgacctcaagtgatccacctgcctcagcctcccagaatgccgggattacaggcatgagccaccgcacccggctgctttttcttaagcaacatgagttaaatgtgtaaccagtttggggaatttgattatgttcgcaaaaactgacattatcaaacctttatatattagtctacatgatattatctaatcgaaaactacattataactgtctagtcaatactggacacatttcagatttcaagattagaagcaaggagttcaatcttaaaattttaaaatttacatgacttgttgagtaattcgatatcagaaaatttcaccttccatttcaaaatttgaacgaagaatggtagtctaaaagattaaagccaaaagtgtttgttttgttttgttttcgtttttttttgttgttgttttgagacagagtcttgctcttgcccaggctggagtgcagtggtgcgatcttggctcgctgcagcctccacctcccgggttcaagcagttctgccacagccttccgagtagctgggactacaggcgcccaacacagctggctaatttttgtattttgagtagagacggggtttcaccatgttggccaggctggtctcaaactcctgacctcagatgatccacccaccttggcctcccaaagtgctgggattacaggtgtgaggcactgcacccggcctgaagccaaaagtttattcatggaatttataatacagtgtgtatttggatgtagagatccctgttactgtttttaaactatggattaagagttaatctctttgagtaacagtcttagcattctcttttgaacttttttttttttaatttctcagggagagtgttattgggaaacctaactacacaggctgaaaagatacataagataaaaatgaaatatttttaaacaaacatctttgtaaccaccacccagggcaagacagacattgccagcatcccagaagcctcccaccacctatattttcccatcacaactatcaccatcttaatttaagctagatataaatgttcttctgacatttatagttttaccatataagtttacatctctaaataatagagtttaattttgcccatttttaactttatgtaaataggattgtgttgtatatattttatttttagcttttattgtttcataatattccatcatgaatataacacaagtttattccttctgccattgttttggatattgcatttagattgtttgcagtttggggctattataaacaatgcttttatgaacatttctgtttaagtgcactggtgcatgtttatttcgttttcttgagattatatacttagaatttgaattgcaagaacatggggaatgttggtctttatcaggtaatgccaggtagtttttcaaagtagttgtttagtggtttttacttcatttattagtatgtaagagttcttgtttcatatcccttaccaacaaccgtacgtggtatcatatatttcaattctagccaatcctggtgggtatgtagttgtatttagttttaatcatttccctcattactaaatggggctgaccagcttttcatatctgggtgtttggatttcatttttcataaaatgcctttgaaatcttttccttttttaaatcgaaacacgtctttttctagagttctgtattctgaatatatctccattgttggatgtatatattgcaaacattttttccatttagtagtttctttaaattaacagaagttcttcattttaatgtaaacatgttcatcagttttttatggctagtgtttctttttttaaaacatcatagagatactttgattatctttaaacctttttgtgctttgctttttcacattgacgtttataatgcatctgaaattgattttgtgtacaatgtgagatattcagagctttatatttagtaagggattcacttggtttatattgtccatattataatttagggcttggatattataatttaaatatatctggaactataaactactcttgaaatttttggctatttacatttgatgtggtatataattagggtaaccatatggcctagtttgccctggtggaaagtccttgtttgtgcctgctctggcataattattaaaaacatcccggctgggcagggtgactcaggcctgtaatcccaacatttccaaaaggtcaaggccggggtattgcttgagcccaggagttcaaaaccagcctcggcaatacagggagactccatttctacaaaaaattttaaaaagtgcattagccaagcatggtggcatgcatgtctgtcgtcccagccacttgggaggctgaggcagggggattgcttgagcccaagaggagctgtgatcatgccactgcactccagcctgaaacatagaacaagaccttgtcttaaaaaataacaatgatagcctgtaatcccagcacttcaggaagctgaggcaggcgaatcacctgaagtcagaagctcgagaccagtctggccaacatggcgaaaccccgtctctactaaaaatacaaaaattatctgggcgtgctggtgcatgtctgtaatcccagctacttgagaggctgaggcaggagaattgcttgaacctgaaaggcggaggttagagtgagccaagatcacaccactgtactctagcctgggcaacagagcgagactctgtctcaaaaaaaaaaaaaacacaaaataataataataatctgttttctcttttgaaaatgtttcagtgtggataagttatcacaccacataatcaaaagcctaattgcagaggtgctgtgaaatggtcgatgtgccttattttctgctagagatgtcacagactagctttagttctagaaagtgaaacaggtaagtttgaggggctttgatcctcggaacctaagcatatgtcaagaagtcataaaggcaacctagaaaggctttgatgtcaatctgctatgtatgtttatagatgatctgtgttgcagtttgtttctgcagtttgttgcagtttgtagtctgtgtcacagctctgaatttattttcttctcagcactgatcatgacttacacttaatcttctttgcttatttgcatatgtgtttattgtctgtcttcaccttccccttcacctccagactctgagctcctggtatgaaaggttgtttagttagtgagtaaatggaaatgatttagcattttagcttattgttcttgtagaagtatcttgggtatacctccaaataatgcttttccatgttcacaattgcatttccctataaaattaaattatcctgcctcacattaagaaatcttgaagaatttcagtgagtagggatgcaagaggatgaaatctagtgacataattaacattattggggaggtaaactctttgtgactcaagctcaattataattttcatttaaagtttaaaggaagcctccattcagggtgtaggaagaaattacacagtggtgacatgtatgaatattttatggaatagttccagttgtgtttgcacctacgtctataagtgagtaggatgcctaaataggctaaaatgaatgaaattcttataaaaaataaattcttacatttagttagcttacctggataatcattcaaatggaaaccaggttgctactgcactgggaaaagagactttatgaagaacgattatataagccacttgcctttaaaataagttgttcttaaaatcaagagattggtggaagaatagaaaaacaagtaaattgttaacagatttctttaatcatctgctaagtctggctcattggcataatttatctacttcttgatgttagtcacatagtcataaactattaccttattggagagagtggaagagctttgtgtgatggataaaatacttgcggggtgctttatttgatttcttgcattacttggggatctaaatctagcaattcacaaaattactatctaaaatgacaaagatctagtgaaacttcaagccacagtttctttttgttgccctatttagtgatgttgccagtacttggagccttggaaacagtttattattgttacatagtccgcagaaatacttggtaattctgggagtctgaagtcaggtgccagaaactgttcattttctagtaggggtaagtaaggtaagccatgattttctaagtcggaagtaaagaaaacagcataaaactgaagaaaaaaaatagtagaaggaaggaagtaggaagaaaaaagaaatcttatctgtgcatgatacatagcaggagttttgtatttaactcagtgccacagtaataatagcagtaactacagatagtttaacttgaatttaattattccgtgctagaagatgcttgctatagaaacaatttgtctttctctcatgatgctataaaataatatattaattagctgttttaaaaactagataccattgaagtaaattttgttgttgttgttttgagacaagagtctcactctgttgcccaggctggagtgcagtggcacgatcacagccttgacctccctgggctcaggtaatcctcctgcctcagcctcccaagtagctgggaccacaggcacacaccaccacacccagctaattttctgttttttgtagatacagggttttgccatgctgcccaggtcggtctctaactcctgggctcaagtgatctgcctgccttggcctcccaaagtgctgggattacaggtgtgagccacagtgtctggcttgaagtaagttttttagtggacaaagtgtgagttggtctgtaaaataatttattcccaagggccttattctagttttgtagggttttttgtttgtttgtttttttctggaagaaaatgcgacccaaaatgccagttggaatacttagcagctttttggtcttggacaagttatttaaccttagctttaacttcttcatcttttcaatagggatggataataatgcccatctttcagagtcattctgataattaaatgaggtgatataaaagaagtaactagtttaatgttggtgcttaatagagaatagctgtcccatgttatttcccaccacgatctccctctctgtctaggtgctcagtctctctagtagcccaactcagtcagtcattcacacctactgtagtctactgtcatcttactgcctttcactgtcctctcattcccctcataactttacttccttctttatcctgcttcaactccatgagcaaccacgacagtcagtacacattccctcagcccccaccccattcccctcttgctgtcttatacaagaaatcacaaccctgattatatcaacacagatgtgctgaccagcctcactctaaatttatgttcgctagcctccgcagtcatggtcacttcctagcagtcacactatacttccataatccatttcacttttctacatggctattccattcattttcctcaagcctccaacacctcccccatattcactttcagccccttaaccgtgctttctatagcagttaactgagaaaagaacagcaaacgaaagataattttgataaacttacccctcacatacccagttacctgcatctgttccccagacttctatgtttttttctgatcaatatggataaactgttcttatttctgtctaagaccacccttccacttgtgcagcatttgtcccctcttggtgattcaagaacattgctccagcagttctctactctcctcagtttttccttccctaacgtatctttctgtctgcttacagataggcagttatttcttctaccttaagaacaaccaaaaaaccccactgtacttgaactgaatttcctcttttctaatgattaccccatttctatccttccctttatagcgaaaccccttgaagaagttgtctacaccactggtgttcattcatttttgagccctgtttactaaggtttttattcctacatatgaagttttcttatcaaaattaccaaagatttccatgttaccaaatccagtagttagttcttagtctcattctacttcaccagtcagcattacgtggtacagttagtctgttctctgtgaagcattttcttaacttgatcgtatgccatttttttcctcatatctcactggttacctctcaatctccttggctgattgaacctgtaagccgccaaatgttgggagagctccagggctcagttatctccccttttctctctgtctgttaacatttatttaatcatctgcattcttttgatgatctcatccatctagttcctggtttcaaatactacctgtatatcactgactcctatctctagcctgaatttctcctctgaactcctgacttgtatatccattgcctctttaacatctctacttgtagggaagtctgctagaatctcaattcagcatgctccaaacctgttcctccatcagccttccccatctaatcaaatgacagctctattctagttggtaagaccaaaacaccttggagccatccttaattcctctctctctgtctcacctcatgtgatccgaacctatcagctctgctttcaaactagatgcagaatttgacctctgaccacccctactaccctggtccattatctctcactagtctattcagagatactcagattcctgtttcttgtttccaatattgacctctcagttgattctttctcctcctcccaattttacttgagtgaatctttgtaattaaaaaataaaatatatgggaaatgtaggtgacaaattttcttagtgaacctatgttttcttgtgcttgactggttggttggctatgtatttccaaattaagagtcttttttctgtggaactttgaagttactgctttttgttcttctaatattctggggttgctgatgccagtctgactctcagtcacttttctctctggaagcttttatttagaattctctattcctggaattcacaaatgtgatcacactggtttgttgttgtttgtttgttttttggtttggtttgatttttcctctgagtgtttctctgtggaccttgtgaatctgaagagtcaactctcggccgggcgcggtggctcatgcctgtaatcctaacactttgggaggccaaggcgggcagatcacaaggtcaggagattgagaccatcctggctaacatggtgaaaccccgtctctactaaaaatacaaaaaaaaaaaaaaaagccaagtgtggtggcaggcacctgtagtcccagctcttagggaggctgaggcaggagaatggtgtgaacccgggaggcggagcttgcagtgagccaagattataccagtgcactccagcctaagcgacagtgagactccatctcaaaaaaaaaaaaaaagagtcaactctctttaaatctaagaaatccattcattctctctacctctgacacgccctccctcccctctccccctcctctttctagctccatctcagataatttctatcttgcctcctgctccccagccttgttattgttgtttttaattcctcatggatgcgtttatcctccaccctgctttttcactcttatatcatattttcatatctgtctcttggttttatcatttggagattaaaatataaaaacagccataaggaagaatgcccaactgaaagcagcttagagagtcaacattaaatttaaaccattgggtaaagatagcaaactggacatgcttttacttttccttcctgttgataaatcctatcaaaactacgtgagagggacttttaaaaaatacataaacccggccgggcgcagtggctcacgcctgtaatcccagcactttgggaggccgaggcgggcggattacgaggtcaggagttcgagatcagcctgaccaacatggtgaaaccccgtctctactaaaaatacaaaaattagccagtcgtggtgttgtgcacctgtaatcccagctacttgggaagctggggcaggagaatcgcttgaacccaggaggcagaggttacagtgagctgagatcgtgctattgcactccagtctgggtgacagagcgagttcgtctcaaaaaaaaaataaataaataaataaacccataaaggacaaaacagatttggaaaggagacaacatcaacacagtttggaaggctgaaaagcaaatagatgagtttaaatgacttagcaaagttgagagccgcaacctaagtagtcagtgggaaaagccaagatgtaacttgactttcaccccaaactcctaaaaggctcaggagttgacatcaacaggcacaatggaaactagaagattgaagtaattgggatgaagggtgtaagttttgggttataagtttaacttattaacttttaactttattgggtataagttacaatactataaaattcacccactgtaagtgtgcggtcccgtgaaagttgtgtatccatcaccacagtccagttttctaacaattccatcaactcaagaagcttctttgttgatgtttagtcagtagctgcctacgacccccagtcctaggcaacctctgatctactttcttttctagactttcctttgctttttttttttttttttgagacggagttttacagttgtcacccaggctggagtgcaatggcgcaatcttggctcactgcagcttctgcctcccgggttcaagtgattctcctacctcagcctcctgagtagctgggatgacaggcatgcaccaccatgccagctaatttttgtatttttaagagacggggtttcaccatgttggccaggctggtctcgaactcctgacctcaggtgatccacctgcctcggccttccaaagtgctggaattataggcatgagccactgcgcccagcctttcctttgcttttaatatgtaaattattaaattgatttcctaatattaaaacattcttgcatttttagaaaccttaaatttcaaacaactgtatttctctatatcaattatcaattggagtaattagccattatctataatagattcattacatggagttcatggtagatttcagggagtcttgatcccctgaagttataagcaatttttatttacatacagaaacatttggggagagggttcatagatgtctttaattttccaagacccagataaatacaagctacctttgcttatgcctaagttaaaagttttaacatatcttttcacttttctccctttgtcccattttccaggttttatctaatttggggtttaggttacagattgttattattacattgcttctatttttagaatcccttaagagcagttttattagcaatgttgacttagataaaactgagggggcttttttgttttttgtttttgtttttcgtcagagacaaggttcttgaggacacaacatttaagctggggcctgacagatgagttagaattagccacatgtagaggctatctaggaagatgttaaggctatctgttatgttcagttacataagagagatcctttgtaaatgtgttttgctttgtaataaaccttctaaggagccagtattgttttgttattacatcactctctaaaatttcaaattgcctttttggttttataaggacaagatgggctcttaacaagatggctttggggttttttcagtcgaagatgatgtaacctctagagttaagtgcgaagaagttgattttgagaatatattgcagaaggtgcaaggaacgtcatctgggttatgacctctggaagtggaggtagttttttgtcattgggtcgccagtgcttggcatgtgatctgtgaggtgatcgagaatattgcagacacaagggcaggagtaatgcctctgttaggggtgttaagttcgtagtgggttcaggaagagatggtggaggctgagggacagatgttttcattcagtgcagtaatatttgctaacaggaagaaagtagtgtgggtaagggtgaagaaggggccagagaagagagtgcagatgtgcaaaaagtgagagtttgtggaagcaggccgtgatgtggttccaagagctggactgtcgaatcttatttttgtaaagctctgctcttaagtaaaaaacccagagtcacctttctaccatgctaccttcagggcctgagcaagagtactgcgttgtagaagaggtggtgctttttagtatttaagtaattaaaccttccttgttgtattaaatccatatataataccttattccaacatatctcagatagtttctgtatctcagatagtttcagcaagagtttgtgtatggcaccgaatggacaagagctgtacatatatataaatgtcagaaagagaagaaaaatactaactgtaactttttggtttcctggtttgctgcttttgcatgtagactgttcttaaatatgctgaggttgggtttgtttttcccactttcccattctatcaacatcagttgttatttactctaaacaatcattctttcattttatcctaagtgagtttcttttataatttaattcagttcccttggtattaaacactgttcagtactttggaagtagcttacttaatagctttttctgctgtgtgatttattcaagaaatattcaaatgtcagctatatgtagagcactgtgttagattctgtgggagttgcaaagatgatctagatacagatctttctccagatctttaaattctagaagggtagtatagacagaatgatagaatgctgtgtggttttcaaaggaagaacagattatttcagcccaggtggagttgggtgatggctaattttatgtgccaacttgactgggccacagtgcctagatatttgatcaaatattttcgatgtttctgtttaagtattttttgtatgagattaacatttaagttggtagattgtgagtagcctccatctgtgggtgggcctcatccagtcagtggaaggcctttaatagaacaaagactgacccctgagcaaggagttctgccagcctgctctgcagattttggatttaccaggcctccttaatcccttgggccaattccttaagtctctttctgtgtttgtatatgcacatctgatttattctgtttctctataaaacctgaccgatacctggaatcttcaagttgaaatttaggatagggggagagagaaaaatagaggacagaaaacctgatctgtgaactgagaataatgagctttgttagaatttaagtttgagtatgctgggaccaggtcttggagctgatacaggactgaagagttttaactttacatcataaatcttattctaagttttcatttgaacctggttttagtttcttaactttgtaagcgtcttttggatatttcagtgtttcatttgttgctctcaaattttggtattcaacagactcgtttctttttcttttcagttaacattagagtctaatttacaatttttagttcatgtcaaaaaaaagttcaggccgggtgtggtggctcacacctgtcatcccaactctttgggagtccaaggcgggcagatcataaggtcaggagatcgagaccatcctggccaacatggtgaaacccagtctctaatttaaaaaaaaaaaaatacaaacattagcctgggcgtagtggtgcacacctgtagttccagttactcaggaggctgaggcaggagaattacttgaacccaggaagcagaggttgcggtgagacgagatcgcgccactgcactccagcctaagcaacagaccaagactcggtctcaaaaaaaaaaaaaaagttcaggctttgggaaatttttttttttttcttttgagacagtcttactctgttgctgaggctgtagtgtagtggtgtgatcataactcactgcaacctccgcttctggggttcaggcaattctcatgcctcagcctcccaagtagctgggattacaggcgtgtgccaccacaaccggctaatttttgtttttgttttttcttaaattagagacagaggtttcaccatgttggctaggctgggctcaaactcccaacctcaggtgatctgcccaccttgccctcccaaagcgctgagactacaagtgtgagccaccatgcccagcctggaaaatgttaatagtgtcatttggagggtactagcttcacttaactatgtattttaagtatataatgtttatcatgcttaaatttagaacatttttggtattttataatggaggtattgtattgggaagtttgtcactacaacttatttctctggccttgtactatgattttatatacaagtattatatacactaacaaccagtttggcattaggatgatgtttgagcttaactaaatctggagactggattagatgagtgattttgccaaataatttgaccctgttttgttgttgttgttgttgtttgtttttttaatgcatgtgatgcatttctattaataaatctttggtgttatttcaagctagaaatataaaattgattctattttaagactaataaaattattagctgggcatcatggctcacacctgtatgtaattccagcactttgggaggctgtggtggatggatcgcttgagcccaggagttggagaccaacctgggcaacatggcgaaatcctatctctacaaaaaatacaaaaattagccaggtgtagtgtgtgtgcctgtagttctagctactcaagagactgaggtgggaggatagcttgagcttgggaggtaaaagttgcagtgagccgagatggcaccactgccctccaacctggactggatgacagagaagggacgctgtctcaaaaaaagaaagaaaaaattattagggcaatgtagcagcatgatgaagtttaaaatgtagaggacaaccacccctagtttccccattctccccaactacttttgtcattctctgtattctcttgtaggctgtatttgtaggtgtgtgcgcacatgtgtgtttgaagttgaaaattcacattacatgcaattaaccattatattgtgtacaattcagtggcacttagtgtagtcacagtgttgtgcaactaccacctctccttagtttcaaaactttccatcatcctactaaaatacccctaggcattaagtaatccctcttcatttcccccataccctgttgaccactaacctgctttctgtctccatggtttttcctatttcggatatattatgtaaaaggaatcatacactgtgtgacgttttgtgtctagcttcttttactcagcataatgctttcacgcttcactcttgatgtaacatgtatcagcattgtggtttttttatggctgaataatatttcattacatgtatttttaaatatatatatcatatatataagatatatagagatcataatttgtcttttgttgatgggcatttgggttgtttctaccatttggctgttttgaataatgctgatataaacatttgtatacaagtttctgtgtgaacataatataatctctggtactttgttttggcagccctagcaaactatattgtgtgctttatttccagtgtagtgcttagcccacttgctggactgtaacttccctgagggtggggacataaatataatgcctgcctaatattacttaaatattctaagcctgctgaatcactacattttcgttaattcatgataatccccaaaatatcccagaatcagatcagtatctattcagctacataatactacttaatagtagtagtatggcttactttgaagcctaatgctgtgtcagcttcagagattaagatgtcaggaaaccaatagtagtacttattagaggcattgcaagtggtatttagtgtttagtggaccttcaaatccaattcagtgatatcaaatccaagtaagcaaatagactgagctccttgagaataggaactggtttccctagcatctagcatagtacctgggacaggtggtgcccagcaagtatttgaaagaaatgggatgaaatgcaatgacatacggcacctatgttcagcttaaaactccagtcacattacctatgggtatttacattggaatgtgtagttgctgtagaatcccaaaatgaatactagaataacaatgttctttctcaaagtactacgtgttatgaatgaaaaaaaaaatgattagaacatagttcagattttgccagccagacaaaggcatttgtgctgtaatctgaggtatgccttcctgcactaagaggaacagggtttatgggaaaactaggattaggagcagaccatttgaaatctgtgcatctttgtaatttaagcactaatgtaaacctaataaaaagatagtagtgtgcttaaagataagttaaaatttttaaacaaataatttggtaaatttagaactttccctttaaaaacagtaaaggtgaccagaagtggtggcactactcagggctagctgtatttaactgttgttacctgcaaatgcaaaaactaaataacattttaggaaaaattggaaatgaaccaatgtgatttctgaatgtactgacataattcccttatttactgattgcatatgagctaatgtatgtgttgtagtagaatagttccagtagttctttaccttttctgtgcttatcatgcctccttcctttctactgttaatgttcaagttttaatcttccagacttctcatttgttctgtaacagtatcttctagccacgtgtgcccttctaatctctcttgtggaatttgttcttcacaatactacaagaattctattgcattgaaaaccccaaatcttattaagccagcctccatcattagagcatgtttctcaaactcttggtgtgtgcaaatcattcttattctgtgatttctattttcatgctttttcagtttgcttcatttgccatatgatagaggttttcttcagaccatattttggaaagtatgctcttagttttaaattctactatgggttatttccaagacccatagtagaatttaacaaattctttcaaataaaaaattttaaagccttcgcttattatcaactagccaaaaaaaaaaaaagtgtatcaagtgactcctacttgacatgatgagagatgaaagtgtaagtttagatactactactgtctgttgagtttcctctctctccattcattttaatctcccaatttttgttaaaatgttgtgatatactgttcttagtttgttacactttgtaactttgtagtcttttccagaactatttctattctagaaccaaagtaaattgtcatgtagacttctgtgttgaaatgaatttattgtccatttcttatctttagataacactttttttgagttattttgatataccaaagcataagtctctgtggcttgtagtggtctgttttttgtttgtttgttttgtttttttctggaaatacagtgaaagcttttgatgaaatttaggccttcatgttaagacatttctattctgttatatctttaattatatttttcttattcttttgtctatctcaggggcagcagttaactgttggatcttcataactatcatcttctctctaacctttttaatgctgtagtactttttcatgacatcttgtttaccttttctcaaaattattctcttctagtgatttggttttgctgcattgactgttgttgcatttattagttatgctgttttatttatcttgtgtaattttctttccttaattctgcatgctaccctttcaatgttgttttgatcataaaagtctatgctatctgtttttcttgtgaatgtcgaagcagttgtttcagaaaatttcttctattttctgtgataaatactaatactgaatgtatttcatctaccttttgaagactgtgtcctatcagggcaaactgctggtaatggaaaaaaaaacaaaataagtaaatgaagaccgtgtcctctttgattcttctcttcttctttactgccttttttctttattttgatacacctttttctttccttccatcattgcctccctcctttccctcttttcttcccttctttccatctttcctgtaaaatttttcttgattccctgatttttctactctttttttctttagtaggtcctttcagtacctgctgcttgccaaaacgtgaaatgcagattctctttttacttgactctgaattcacctggctaagctctgttaggccttaggaagcttaatagagcttctctaattttgtagaagaagggcctttgactttttccctctctgcttcaggatgatctcatctgctactttggaagcatgagactttatttgttttgatggtactgaggttaggggtgagattgatttatttgtaattagtcctttctcctccttatccttccttttggataaaggtaaaaatataaaatcctcctgcctgctaaagtactgtttggccatcagagaaagggagcttcaggtagggcattccgcagtccctgtccccatcttagcaagttgaagatgctagtcaaaatttctctggggggcaggagagggcagaggatacttacgtatggattctggggttggtctttcagtttcaactaactcattctgtacctgaatgatactatttaataaaatttcgtggtatgagtttgagaacttgtcatgattttagggatattttaacttcctttttgtttctttcctttagttttagggaaggatcttctgccaaactacctgtgccactgtctttcctggaagtctcataagtactagaaagaacttttagaataagagtgtaggacattatttacactgaaataacattctttttgttgtttttttttttttttttttttttggagtcagattgtcattctgtcacccaggctggagtgcaggagcgccatcttggctcactgcaacttctgcctcttgagttcagccaatcctcccgcctcagccacctgagcagctaggactacaggtgcatgccaacatgcccagctaatgattttttgtatttttagtagagatggggtttcaccattttgttgaggccggtgtcaaactcctgacctcaagtgatctgcccaccttggcctcccaaagtgctgggattgcaggcatgaggcgctgcatcagttctgcaaaaaaaaaaaaaaaaaaaaaaaaaaaaaaaaaaagcgtatgcattaaaaatactaagggggccaggcgcggtagctcacgcctgtgatgccagcactttgggaagccgaagcggatggatcacttgaggtcaggagttctagaccagtctggccaacatagtgaaaccccatctccgctaaaaaaaaatacaaaaattagctgcgcatggtggcacacgcctgtaatcccagctgctcaggaggctgaggcaggagagtcgcttgaacccaagaggcagaggttacagtgagccaagattgcgtcactgcactccagctggggcaacagaatgaaactccatctcaaaaaaaaagaaaaaaaatagaaatgttaaggggtttacttcctttagggtactctttaaatgaaatatgatgtttcatattctctatttggaacttctgtatggatgcagacattttcagaaatctcccaggacaatgaacctgaaacttatgtatttataagaaacttggggatttggttattttatttacttattttgaaatagggtcttgctgtgtcacccaggctgcagtgcagccacgcttcagtacagcctcaatctcccaggctcaagcgatcctcatacctcagcctccttatagctgggactacaggcatgcactaccacacctggctaatttttaaaaatgtttatttttttgtagagacagaacatcactgtgttgctagggctggtctcaaactcctgggctcaagcagtcctcccaccttggcctcccatagtgctgggattacaggcatgagccactgtgcctagccagaaattggcttaaaatgcagatttttggaccctgtccccagcaaaaagattcggtagaaatctttattcgtagccagtttactgtgttgcaggtggtccccagtttaactttgagtaatgctgtcttcattgttaaaataatcagatttaattatatggtagatattttaggtaactagggtatttcaagctgtcccatggggctgagtagctggcagctgcttgacttggcttctagaggacttactgctcagcaaggtaaatgttattaataccttcattgctctctgtgtcccaaaggtcaatacccaaactttgagattttgtagactggaggaatctttgtctcccactccttccccaagaaagacatgggttgctaatttttattttgtcgaatgaggacattaaaaataagttaaccgtgagccaggcacagtggcttaggcctttcatcccagcacattgagaggctaaagcaggaagatcacttgaggccaggagttcaagaccagcctgtgcaaaatagcaagacctcatctctactaaaaaataaaaaaagttagctgggcttagtggcacatgcctgtggtcccagctacgtgggaggttgagatagaaggatcgcctgagcccgggaagctgaggctgcaggaagccatgaccacaccactgcactccagcctaggggacagagacccagtctcatcaataaataaataatgaaaggacattttaacaccccactacaaccactaaagatacaaataaataaaaatataagaggaacacaacctcataatacagatagtcttttatattgcatatatttaacttcgggcaaaagccactctattttcctctttaaaaaaacttttttagctatagattaatgaatactttctcagacatttcagaactactgcttagtacttgaaatacaacatttagaatctggggtactacctgaatgtgatgagtagtcacacatctcatatcctttgttttcttgccagttcgatcctttggtacagaagacagaccgacagatcgtccaataccacctcgagatgaagtctttgaatacattatattccgtgggagtgacattaaagaccttactgtttgtgagccaccaaaaccacagtgttctttgcctcaagacccagctattgttcaggtaactgatggtaaatttgtcttggagtacaggtaaactccgcacagggttagccttggcttttttctctctagttgaatgttcatgtagcttatcatttccaagttactgggatacctgaaattactggataatgttctcatctaggtttttctctttgtatcataaattagaactaaggtaagaaacagctgaggaatttattatgaaatattttctaatttcaacaacaattaccatagctaacattgaaggctactctgtagaagtgctgtgcatataagataccctctgaggttggtactataattattctcacttttaacaagtgaggaagttcagatggagccacaatttgaacagatccaggcagcctgcttcagaatctaggatccgtgctaccatgctattgagatatggtttatattgcaaaccaaggcaataacagctactcttaggtaagattattaggcttaatggggaaaaaaaagcaaaatcacattgttctgcatatgttataatatgcagtgttggtttttgttttgtttttctttttctttttttttttttttgacagagtcgttggagtacagtggcgtgaactcggctcactacaacctccgcctcccaggttcaagtgattcttctgcctcagcctcctgagtagctgggattacaggcatgcaccaccacacccggctaattcttgtatttttagtagagatgaggtttcaccatgttggccagcctggtctcaaactactgacctcaggtgatccgcccacctcagcctcccaaagtgctgggattacaggcatgagccactgtgcctggcctgcaatgttatataataagaaaacacaaacatcaatgtattttaacatatttagatcagctcttaaatctcccaatttaagctttttaataaggaattgtaaattttgttgcagcataagctggagaaattctctactctcatctacccctacccttgttaagtcttattttggtgaaaggaagcctgaagtggaaatgtgaatctctttaaatggagaaggaagagacacattcttaatagagatagctccctacaccaaacactggagttaccttactgtctcttttatatggcttttgataattctccaggaaaccagttatttgagtaatcggttttatggaaggagaaaaactaagagagcgcatatgaaaatggtgttgaataacttcttccaatcatcataaacttctacttgatctccttattcattcattcagtagtatttacagagtatctggcatgtgcttaacactagtggtgaacacacagaaaaggtcctgccatcagtgagtgtatgtcctggtagcctttaatacacttcatgtttatattatgaaacagtttatagtaagataatatatgaagtatacatgtattaatatatgttatatattttatatgctttaggtttaagttaaagtttttataaaatgttcctcagcttaatgtaactataagtaaaaatgtaaatggttttatgtgggatatgtttgtttctacgtctgtgaatttaatagtaggcctcaaatgattgaaaataagagtaaaatcatacgtgagatttatatcaacatcagactaaaactcattattactaagtgtgatttttctcatatttttctttaagcaaagttactttacttaagtaactttaattctttcctcaatctataaaactcttaattcaaatggggagtttattgtagaaaaaagtatttgtaagtcacattgagtataattggcacattatagacagatactgaaatcaaaaggttgtttggctattttaatattaagtgcatattgtaattcattttatatctagtagttataatttaatagttttcttaaaagtaaaaatctggaattttttttttcgttatatacatgttgcttagagcttggaaacataactcatgattttccttcagtcctcactaggctcatcgacttcttcattccagtccatgggttcttatggacctttcggcaggatgcccacatacagtcagttcagtccgagttccttagttgggcagcagtttggtgctgttggtgttggtatgttttctttttcttttctttttttgtttttgtattcttcctttctttaccacaaaggtatagaaactcaacaccaactattagaaatgttgtttgatgttccttttgtaactttgttttatggtattcagaacacattttgatgatatcttaaagcctttattgatattagtgggtttttaaaagtcagctttcacagagtaacatttttttttactaggtaaaaaaaaaatggatatactaggtatatccaatatctaccaaatctaccaaattggatatactaggtatatccaatatctaccaaatcttattggtaattggttttgttttgttttttttaaagacaaagtctcactctgtcactcaggctggagtccagtggcactatcttggctcactacaacttccacctcgtgggtttaagcaattctcgtgcctcagcctcccagatagctgagattacgatatgcatcaccacacccagctaatttttgtattttcagtagaggtggagtttcactgtgttggccaggcaggtcttgaactcctgacctcaggtgatccacctgcttcggcctcccaaagtgctaggattacaggtgtgagccactgcgcctggcctggattttaattaataaatttttctttttaatttctttttctttttttttttttttttttttttctgaggcagagtcttgctctgttgcccaggctagagtgcagtggcatgatctccgctcactgcaacctccacctcccaggcttaagcagtgctcctgcctcagcctcctgagtagctgggattacaggtgtgcgccaccactcccagccaatttttttgtatttttagtagagatggggtttcaccatgttggccaagctggtctcgaactcctgacctcaagtgatccacccacctcagcctcccgaagtgctgggattacaggcgtgagccaccaagcccggcctaaaacatttaaaaatgtttattttaaacatacataagacatgcacacataaagatacgcatagcatgattgagggcttggtgttttgtttctgtaacactggatttgaaacgaaactataatgagaatgtatagcagggctgggcgaatgacaggcttgcttatgactggagggtcaagggctattgagtgcaaaagctggatgtaatcagattagctcagtgttttgtttttatagctatgcattttagcgtttaaaccatggtaaagaacagcttttaaaaaaaaatcgcttctcagccttttggctaagctcaagtgtaaaaaaaaaaaaacagctttaaatctcaagcttttgcccctaatcttttaaaatttcattgaaataattatcagtttactgtttcactgcaccacaaatttagtttcaggtgtatcttgaaactcattgatatgctaataagttttattaaaattgttaaattccttcctgtgaatatactttttatacagatgtgacttaagtatttaaatgttttacttattcacaaaataacaaagaatggcaaaaaaaaagcaaactaaaactgaatgagctgggcgcggtggctcacgcctgtaatcccagcactttgggaggctgtgggcggatcacctgaagtcaggagttcaagaccagcctgaccaacatggagaaaccccatctctactaaaaatacaaaattagctggacgtggtggtggtgcatgcctgtaatcccggctactagggaggctgaggtaggagaatcgcttgaacctgtgaggcagaggttgcagtgagctgagatcgtgccattgcactccagtctaggccacaacagcaaaactccgtctaaaaataaataaataaataaaactgaatgaatataaacagaaaccacagatgctattacatattaaattgataatataaccacacagagggctgggtgcggtggcttacgcctgtaatcccagcactttgggaggccaaggcgtgtggatcacgaggtcaggagatcgagaccatcctggctaacacggtgaaactccgtctctactaaaaatacaaaaaaattagccgggcgtggtggtgggcgcctgtagttccagctactcgggaggctgaggcaggagcatggcgtgaacccaggaggcggagcttgcggtgagccaagatcgtaccactgcactccagcctgggcgacagagtgagactccgtctcaataaaacaacaaaaaaaaccacacagaggaaaaaataattcaggtaacttttacactcttagtaggatatattctaacaacaaatagaactactaagaaaacttgactttgatttgtattattggtgttattatttatttatttatttatttattttgagataagatctggctctcacccaggctggagtgcagtggcacgatcccggctcattgcaacctccgcctcccaggctcaagccatcctcccacctcaacctcccgagtagctgggattataggcatgcaccaccactcccggctagatttttcttttgtattttttgtggagacagggtttccccatattttccaggctggtctcaaacttgtgaccttgagtgatccgcccatcttggcctccaaaagtgttgggattacaggtgtgagccactgcacccagccaggtgttaattcttaaactgttttgtatgtattataggaaagggcaaatgaataaaatacttatgttgggaaatagtgtttttaccatggagacggaagatataaatatggaatgggaaaggtgagaaagaaccctgtggtgctgaatgtaaatagatggtatgtgtatggactcattttttaaaaactggttatttcctagctctgttcgtagaaaggacctagaaacaatggaaaccccgtagcaagggacacatgtagactcagctcttagtttctaaataccactccccactaaaaggaacaagggcccattgaaaaacaaaggaaaagacatacttttttcatataaaaatgcctgctaataagtagaagcagtggtagataaagaaaattgccattttctaatctcagtataataattagcgaggattatcattagatgctgaagtcattgggtgaaaggtgttaggacagcatattaaggtggtcttaaagtatcatcccacaatttacaaagggggaaaaatgtacccttgtaacacagacatctggtggttaccaacttcgttgagtgctcaagtttagcattgccatgaacaattatgtgtctcctgttgtgatgattggggtggggggcaaaacataatatcacctttgtggggttcttgctgaaaatacagaatctaattttgaagaaatgggcttatatatccagaaggtgggttgttttgcgagacagttatccacactcttcaaaagattcaatattacaaagaatggagagaggcagcagaactgctttaggctggcaaagactgaagagacataacatccaaatgtaatatagaatcgaatactgggcttttaaaaagttggcgtgtttgtttcctgcaggggagaaaaagaaaacttaaaaagttggtgtgaagaacattttagggactactaaggaacttttgagtatggactaattgttggattttgttattattgttaattttctggttaatcatatgggaaagtgtttttgtttgggggaggtggttttgaagtatttaaaagtaaaagggccaaattgattttagcctctctaaacaaaagaaaaatgtgtatattaaggtataaagatggagaaacagagtgggtttggttagatgttaacagttgatgagtctaggtgaggaatatattgatattctgtgtactccttcaattttaacataggtttgacatttttcataattaaaaattaattccttttagacttactttaggtgaaatagtgtaactttggtccataaatttccaaatccagtagtaagatcaatgttatttattcatgttaaatcaagatatactgtatgttaactgtaacttagaatcctttcctggggattcaagtaaggaatgattgcaaattgtattatcctttttgaggctcctttgactaaattaaatagttaactgactttgagatcatcattatacttcttatgttaccatgaagtttatgtaactaattatgttaaaaaatttgaacaggatcaagcacgtagtatctatatagtaactattgcttctgccattcttcaaggtttactttttaatcagagtattttgtggttgtgaaatgcttttataaatattttaatctaattttaatattattgtgggttgttggtttattacttgggtgtcacaaaagtagaagattttactggcattttccatgtcagtagagtaatttttgcagggtcagattatttttgattaattgatttccatattggttaggataatttgtggagtggctaattagaaaactagtgttagaagttaccaaatgaggaagaggaaagctgtggcattggtcaaggtgacagatgtttttcagaaaaggaattaacttaaatttagcttgttttttgagatggcgtcttgctctgtcacccaggctagagtgcagtggtgcgatctcagctcactgcagccccctcctcccgggttcaagcgagtctcctgcctcagcctcctgagtagctgcggttacaagcatgtgccaccacgcccagctaatttttgtatttttagtagagacagggtttcaccatgttggtcaggctggtctcaaactcctgacctcttgatccgcccgcctcagcctcccaaagtgctgggattacaggcgtgagccaccatgcccagccaaatttagcttttgttggcacaaagtaaaccacattttaagctaggcctcttttcatttttggttcctagtattctgattttaaaaggaaatttaaatgaatctggatcacagtattgctatttgatgagaaaatttttatatatttacgttttcgtgtgttattactattgctttttatttttatttatttattttttgagacagggtctctttctgtcatccaggctggagtacagtggcacaaccacaggtcgctgcagcctagacctcctgggctcaagcagtcctcccatctcaacctccctagtagctgggactacaggcatgtgccatcatgcccagctaatttttgtatttttggtaaacacagcatctcagcatgttatccaggctgatctcgaactcctgggttcagtctgcctgcctccgcctcccaaagtgttgggaaccaccatgcccacccttattattgctttttagtaagtttttttttttttttttttccatttggttggttggtttggtttttgttttgttttgttttgttttgtttttgagactgagtcctgctctgctgcccagcctggagtacaaagacgttagcactttgggaggccatggcaggaggattgcttgagctcaggagttggagaccagcctgggcaacatagctaaaccctggctctacaaaaaaaaaaaaattaggcaagcatggtggcacactcctgtaatcccagctgctccagaggctgaggtggggggattgcttgagcctgagaggtagaggttgcaatgaaccaagagcacgccactgcactccagcttgggaaacagagccagactgtgtctcaaaaaaaaaaaaaaaaatcttgcttatagtgaaaaacatacaaattaaatctacactgagacaccatttctcactatcagtttggcaaaaactcaaaagcttgattatatgcatactcttggcaagtatgtgaagaatatatactctcatacattgagaagaataatataccaggtagaattaaaggactcactctgttgctgcccaggctggagtgcagtggcgcatctccgctcactgcaagctccacctccctggttcacgccattctcctgcctcagcctccctagtagctgggactacagacgcccgccaccacgcccgggtaattttttgtattttttttagtagagacggggtttcaccgtgttagccaggatggtctcgatctcctgacctcgtgatccgcccgcctcggcctcccaaagtgctaggattacaggcgtgagccaccgcgcctggcggacttttcttaaaactgatgcaaaaataattcttatgtgtaagagattagatcattactggccttaatttctgaactcttggaaaaattaaacacctcacaataaatgaagcatcaaaacagtatttccctgtgttaccattgaacagtagcaagagcttactgctgcagttagaaaaaggattcatagaaacagtgaaaggtatagattgaccagctatctaaagtaattctatagcaaggattacagtgaagaaacatggagcaattagatgttttttctgttatatttactccagttgattgtttaagtctcataatcttatgtgccagatggaggagtattggctgaatagaccatcagtgggtacattttagttgattaaatagccaaaccatattggaggatggttctcttaggtctccagtgttttgtagagactaatttttaatcactgagtgatgaagccttgaagagatgcttacgaactttacagttagcataaagccaggggggtgtttcaaccattatggatgttaaactaaggattattaaagatcagaccaggcacagtggctcacgcctgtaatcccagcactttgggaggctgagacgagtgaatcatttgaggtcaggagttcaggatcagcctggccaacacagtgaaaccctgtctctactaaaaatacaaaaaaaatgagccgggcttggtggcgtgcgcctgtaatcccagctactcaggaggctgaggcaggagaatccctggaacccaggagatgaaggttgcagtgagttgaaatcatgccactgtactccagcctgagcaacagagcgagaccctgtctcaaaaaaaaaaaaaagaaagaaagattgttaaagatctactttggtaaaatgtgaaggaattaaacattccagttaaaaggcagagagtgtcagactgaatttaaaaaaaaaaaaaaaaagacaaggcccaactatattatgtttataagaaatgcactgaaagtgaaagaatagaaaaaggtataccatacaaacagcaataacaagaaaagtgtgtagcatacgttaatatcagacaaaggagcttaaagatcaggatttcttccagaggtaaaggttgggggggcgttcttcgtaaagataaggatcagttcatcaagaagatacaacagtcctaaatgtgtaacttttataaaacagtatacccaacaattgcagaatattgttttaagtagacatgaactgctcaacaatatagaccaaatgctggaccataaaataagtcacactaaattccaaaaggaataaaatcatacatggtatattgttaaaccacaaaataaacttgaaattaataaagttaacttgaaaaatccccagataatttggtatcaagtaaacttgttaatcactaatggatcagaggagaatttacaagggaaattagagaatattttaaatctagaccagatgtgatagcatacacctgtaatcccagcactttgggtggtggccaaggtgggaggatcacttgaggccaggagttcaagaccagcctggggaacatagggagaccttgtctctgcaaaaaaaaaaaaaaaatttaagtagctgggtgtggttgtacatacctgtagtcctagcactcaggaggctggggtgggagacttgattgagcccaggaattcaagactgcagtgagctgtgattctgctgctgcactccaggaaaggcgacagagctagaccttttctctaaaaagaaaaaattaaattaaaaaaattttattttcaatttaatgaccagaaagtttgtgggtgtagctaaaacagtgtttagaaaaattttcatagctttaaatacatgtattagaaaacaagaattttcggctgggcgcaatggctcatgcctatgatcccagcactttgggaggctgagatgggcagatcgcttgaggtcaggagttcaagaccagcctggtcaatgtgataaaaactcgtctctattaaaaatacaaaaattactcaggcgtcttggcatgcgcctgtagtcccagctatttgggaggcggaggcaggagaatcacttgagctggggaggcagaggttgcagtgagccaagatgacgtcactacactccagcctgggttacagggcaagactttgtctcaaataaaaaggaaaagaaaataagaatttttaaaatcagtgctttaagctaccagtttaagaagctaggaaagggccaggtgtggtgtctcccacctgtaatcccagcactttgggaggtcaaggcgggcagattacctgaggtcaggagttcgagaccagcctggccaacatggtgaaaccccatctctacaaaaatacaaaaattagccaggtatgatggcaggtgcctgtaatcccagctactcaggaggctgaggcaggagaaacgcttgaacccgggaggcggaggttgcagtgagccgagatcacaccattgaactccagcgtgggcgacagaacaagactccatctcacaaaaaaaaaaaaaaaaaaaaaaaaaaaaaatactaggaaaaatggttagctgggcatggtggtgaatgcccttagtcctaactgcttgggaggctgaagtgggaggattccttgagcccagcagttcaaggttgcagtgaactatgattgtgccactgccttctagcctgggtgacagagtgagaccatgtctctaagaaaagttggtgaggacgccaggggacagctaggaaaaaaaatgaaagaaaattattccaaaagtagtagagggggaagaaaataaaaagataagagcagaaatcaatgaagtagaaatagattatattatcagcaaagtcaagagtttgttttgggtgggtttttttattttttatttttattttataagattgataagtccctaacaaaactgattaaggaaagaaagaacaaccaagcaagttgccaataccaggaatgaaagagtagacgtcagtatagaccttaaaagaataatatgggaatatatgaatgtcaacaaatgtgatagtttggatgaagtgggcaaatttcttgaaaaatagcaaaccaacacaagaggaaataaaatctcaatatctctatatcttctaatgaaattgaaacagtaatttaaaatcacccagaaagaaaattctagactgtttttactgttacattctaccaaacatttagggaagaaataattttcactaatcttacacaaactctttcagatagctatgcaccatgatgcatgcctgtagtcccagtaactcaggaggctgatgcagaaggatctcttgagcccaggagttcaaggctgcagtgagccatgattgtgccactgcactccagccaaggcaacagagcaaaaccctgtctcttaaaaagtaaaaaaagactgggtacggtggctcaaacctgtaatcccagcactttgggaggccgaggcgggcagatcacgaggtcaggagatcgagaccagcccagccaacatggtgaaaccctgtctctactaaaaatacaaaaaaaaaaaaattagttgggcatggtggcgcgcgcctgtagtcccagctgctcgggaggctgaggcaggagaatcgcttgagcccaggaggcggaggttacagttagctgagatcgcgccactgcactccagcctgacgacagagcaagactccatctcaaaaagaaaaaaagaaaattcagagaatacaggaagaggaaatatttgctgaccctataaccaaggccaaataactgaaataccaactgtgactggatcgttacaagaaaattatagatcattgtcccccatgaacataaacgtagtaatgtttattagatgtagaagccagcacttcagaagaaggattgtatatgatgacaaagatttatctcaggactgcgaagctgcaacatttgaaaatcagttgtaacttaccacgttaacagaccaggaataaagaatagagaatccagaaatagacccactcagatacttaaaacagagtaccaagacagttcaatggagagaaaagacattgttttaacaagaggtgttgcagcagctgtttatctgtggaaaaaataaaacttgacccctggcttaaactataaattaaaaataatttggaatagattatagacataaattggtagtagaattggagtagagcgaggggggtgtggcacgatcaggaactcacggaagagatttgctctaaccattgaatgcgtaatccagaggacaagcaatgggaggccaagccaggtgaggaaacacagagcagcctggagatgcaaatatacatcaaagtggctgatgtcttggtcatcacccaggaatactagaaataactggatgggttctactccccacagaattcttgaaagcgctagtccccacattaccgggatattgtgggaagttgtattaggcttctcctgagcttactggagctgcagccagactggactgcacctccaagggagtcccagtggctccccttgtctaagatactgtgctgctttctgaagccacatttttttttttttttttgagacagagtctcactctgtcacccaggctggagcacagtggcccaatattggctcattgcaacctccacctcccaggttcaagcaattttcctacctcagcctcctgagtagctgggactgcaggcatgcgccaccacgcccagctaatttttgaatttttgtagagacgaggtttcatcatactggtcaggccagtcttgaactcctgatctcgtgatctgcccacctcggcctcccaaaatgctgggattacaggtgtgagccactgcgcccggccctaaagccacattttaagagggataagaacaaatagaattcattaaattaggagtccaagaaaggaaggggagagtgtcctaaagaccatgtgaagtgagtaatggttgaagggactggagttgactaacctgaaaatgagcaaattgcaaggggcatgattgtaatcttcatgtgttttaggagcagaaggataaacttctgctgtgggctagactggtgaaaatatagaaaatgttgagagaagaggtaggttttattaactgaagtgaatagtttgaacttttatcttgaggacagtggaagccaccagaaggtctaaagcacgataatgttattacatttatattttgtaaagaatcactctgactaccatctttaggttggatttagaggttgtggaagggggaggtactgttgaaatatagtgaaaacctgcttagatgaaataccaaggaaagagcacagtatatcaaaagtgaatgatccctaagtactgtagaaacttagagaagaaatttgatataacctagtatggcagagaattgggccctttctagggacctttttactcatattgccagaactttttgcagctgctttaggcagaatgcagcctcacagtcctatcttaaggggaagcattgaaaccagagtccattgtctattgccttggaaatgctaaaaaagctcctcgtaaacctgtctgctgatttggctgtttgtccagatacttagtattagaatcactgaaccttaatgttggtgttgaatgtaccatttctgctacttctctagttggtatgggtccttgctgtcccatctgcataactgcctaggacagcactccatgtgttataaacattgcttgcatccaaggatagtggacagtatattggctcccccttcccctgccctccatattgccataaaattcccaaactattcagtacactttaatttccaagattattaatttgtacagatgctggggggagaggtagacaattaccatcattaaaatgctgcattactttatatcattgaataatgtcaaacattttttaaaatttttttatcatttaaaaacatctctttaagctggaagctctttgacatcctttggaacagaaacatcaaacagtggtaccttaccccaaagtagtgcggttggttctgcctttacacaggatacaagatctctaaaaacacagttatctcaaggtaagctatctcatccctaaaatatttccattctaaacttttatagtggtttttgtctttctgaatgtaagagcttttgcagcttgtaaatcgcgtgtataatttctatttggctcttttaaaatttttctccaaatcgctgtattgcaatgaatatattattgaatgactctcactatttagacttattacagttcttagatcatgaaactgaaatgctgagcattctctaagttggactttttttgcaaagcaattatataacttgtatgtaacacttaaatatatcaaattaggctcatactcaccattaaagttgagctatccaagatgaattggaaatatcatctgaaaaaaactgtattatgctgttaacattttccctaacatcctcacaggatggagagtagtggttctcagtgtaggctacccacaactgaatcatctggggtgcttcttaaaaatttaaatcctgagacttatacatcagaatccctggagcctgaggatttatattttaataagcttcttaaaggattgttttatttcttaagattctgctcttcaaccagccagtctcataattttaaatggttatccataccttttattcttatctttgtttcttccttttttcttaatctttttctttcttttatttacttattagagatgaggtctccctgtattgcccaggctggtctcgaactcctgggctcaagcgatccatttgccttggcctccccaaagtgttgggatgttgggattacaggcgtgagccattgggcctggctttttttttttttttaaagataggtctcactatgctgcccaaactgaaatgcagtggctatttacagatgtgatcatagtgcactgcagccttggacacctggccccaaacaagcctcccactttagcttccccagtagctggggctacagccttgtgccaccatgctcggcttttccttatctatttttatgcactttagaaatgggtatttttggctcattgctttatatgaatggtttttgttttgttttgtttttaagtaaaacaatgttgagtcatttcagaaagacctatagtcacaagacagtattttaaaaagctattaagggtaaaaattcaatgctaaacataatcttatgtatttcacttaagatattttgaaatagttcttactgttactcatattgattagcttaatttttttctttttttttttcttttaagatggagtcttgctctgtcacccagactggagtgcagtggcacaatctcggctcactgcaacctccacctcccaggttcaagcgattctcctgcctcaccctcccaaatagctgggattacaggcacgtgccaccacgcccagctcatttttttgtatttttggtagagatgtggtttcgtgatgttggccaggctggtctcaaactcctgacctcaagtgatccacctgccttggcctcccaaagtgctgggattgtagatgtgagccactgcgtccagcctacttgcttaatttttaaacattctaaagattgtttgtttgttttttgagatagggtcctgctctgtctcccagactggaatgcagtggtgtgatcatggctcactgcagcctctacctcctgagctcaggccatcctcccaattagctgagatcacaagcaagcaccaccagctagttttgtagggacggggtttcgccatgttgccaaggctggtctggaactcctgggctcaagtgatccacccaccttggcctcccaaagtgctgggattataggcatgagccacagtgcccggcctattctggaatttttagttaaatcaggaacacatgaaaaagaagcataaatattgaaattagcattattcatgaagaatgagaactaataaggaacttaaattaggcacaggcaaaatgtaaattaaatatacaaaagtcaatagttctggccgggcacgatggctcatgcctgtaatcccagcactttgggaggccaaggcaggcggatcgcctgaggtcaggggttcgagaccagcctggccaaccaacatggtgaaaccccatctctactaaaaatacaaaaattagccgggcatggtggcgtgcacctgtaatcccagctactcaggaggctgaggtgggagaacccgggaggcagaggttgcagtgagccgagatcacgctactgcactccagcttgggcgacagagcgagactccatcttaaaaaaaaaaaaaatttaatagtcctaaagcctaatccattgattatgtaatgaggagaaaagatgattacagtaatgcaaaatagaaattgtatacaaaatatataataagaaataagttggtcatactaagaaatatgaccaacttctatgataaataatgtaagacagggacataaaagttgcatgtaatggaaaaaacatatcttattgctagatagaagaacaagaacagtaccagcacttagggaggcaaagccaggatgatcacttgagcccacgagtttgagaccagcctgagcaacgtagtgaaacttcatctctaccaaaaaattttaaaaataagcagagtatgatggtggacacctgtggtcctagctactcaagaggctgagacaggaggatcacttgagcccaggaggccgaggctgcagtgagccctaactgcactacctcactccagcctgggcgacagaaccaagaccctgtccccccccaaaaaaaaaagatgttgggaagactttactcctcatagttaacaaatttattgcaaattaattaaaaatcaatgcaaatagaatagtaggagaacttagtaaaacagtttatctttaaaataaacatggaagtgtggctggacatatttgaaaaataaaagtaatgggtttactgacatgataataaaatgtagcaatgcaggaaaaaagaaagagatgaatagaaagcaataggcaggcagaaacagatccgagtataaataagaatttatcctgggtgcagtggttcatgcctgaaaccctaacattttgcgagttcaagatggaagccagggatttgagactagcctgggcaacataccaggaccctgtctctaaaaaaattaaaaattagttgggcgtgatgtgtgcgcctatcagcttgagaggctgaagctagaggattgcttgagcccaggaggttaaggtggcagcaagctgtgattgcggccctgcacactagcctaggcaacagagcaagaattcatcttaaaagaatttagtagatgataaaggtattattttaaattagtggagagaaggctgtctgttccaattaataatgttgcctgatcatttggagaaagtcactctagattctttccctcatactgagcaccaaaaaatatataaattttaaatagattaaaatgttaaaaattttgaagtatgtgtttattaaaagaaagaggtgtatttacataaagttatgacaaatgacaagtcctaagagtttgcatttaagttttatcaactaaaattgctgaatttcacaaaattaaaattcctagaattttaagtgtgataagattgtgaagatagctcaagggagtgtgtctataatatgcagaaatcacttctggatttattcctaataatgtatccagtatcacagtatcacctgtatttccctgtttataacaaaactggcatcatgatgattagtaggccttaatagtgaaaaggctttttaagtacacaacaaatgtttctgtacttgctccgattgccccattgcttgtacttctgtagtacttgtgagccataggatcttttctcaaaagccttgataaagaagttttataaacttataagatgatttaatgtagtaccataaaattaactgtagcagtaggctttttcaggaagacatgtgaaataaaaaaaattagcaaggtgtggtagcgcacatctatagtcctagctactcaagaggctgaggcaggaagatcattgggtcccaggagttagaagttgcagcgagctgtgattgcgccactgcactccagccagagcaacagaacaagaccctatcctgtccctaaaaaacaaaaaacaaaatgtgttttataagtgattataaaatgtttttttcataggccaaaacttacataaaccatgatttcccattataatccagtggaaaaattgtaatgcttctattagtggtaacttaattttgaaatgttaagtagattgtgcctgtgtcggtttctgggttttgataaatgatcatttatttggctaactttgccattaatggctgaaatggtattgcacatttgtaagtgcatactttagataatcataaattggggaaatattactaataaattatccctgaatcatctaggtacataataatgcattgtcagcactcaccagttgtttgacacctgcaaatatgcacagatggacagtaacatttgcagcatatttgggggatttttttacgtgaaatgagcattttttttaagcaaaacattatattttggaataattatgagatgtgagtgcctaagcagagatgtacagcaaacattatcaggacagaaagcatgatgggagcacccgatgttacattcttcagttcatgctgtgaccaggcgacctcataaaaggaaaaatataatgtataagtacaaaccccattttttgttttggctcttttatatttgtattttttgagacagagtctagttttgtcacccaggctggatgcagtggaccgatctcggctcactacaacctctgcctcccaggctcaagcaatccacccacttcagccccctgagtagctggggttacaggcatgtgccaccacacctggctaatttttgtattttttttgtagagacaggctttcgccatgttgttcaggctggtctcgaactcctgagctcaagcgatctgcccatctcagcctcccaaattgctgggattataggtgtgagcaaccgcgcccagccaaaccccatattaagcaaaaacttgccaagagatcttttaaaaggcaaggaatgagtatggctactgtgtaattatctgaagggttttttttgtttgttttttggttttgtttgtttgtttttttgctggccttttagtttttatgtttaattacccaagcccctaaagcattaaagaacttcacctatctaactttgtagttcttttactttatttatttatttatttatttatttatttatttatgagacagggccttgctctgtcacctaggctagagtgcagtggcacaatctcggctcactgcagcttctgcctcccgggttcaagctatcccatctcagcctcctgagtagctgggaacacaggcacgcgccaccacgcctggctaatttttgtattttcagtagagacagggtttcgccatgttgcctaggctggtcttgaaatcctgggctcaagcgatcctcctgcttcagcctcccaaaggactaggattacaggcatatgccactgcgcccggccctttactttcttataatagaaatttaatggagttaatacctgtagatagatgtaaaggtattgttttagtcatctacagaaagtactaagaaagattaaaacaagtcaccatagtcttatggttgtcattggcgaaagcctgtgtttgacctgactacaacatgataatttgtaggataattctagggaatctcgtacctggcagcaatttttttttttttttttgatgtaaactcttccactaagtagaaataacagataaaattgtgagggggagggagttgttttgaagctgttgaagtttttttttaaattattattattttttatttttaacctaatgacaagcccactaaggataccattcttaatatctggtctgataagtggattaattcaaatttgtgctaagggtttgaattgatagaaataaaactctggacaattttttttagggtctagattattttgaaatccccaatagggtagtttgttatcttttggttacattttaggtcgctcaagccctcagttagaccctttgagaaaaagcccaaccatggaacaagcagtgcagaccgcctcagcccacttacctgctccagcagctgttgggagaaggagtcctgtatcaaccaggcctttgccatctgccagccaaaaggcaggagagaatcaggagcacaggcgaggtagaactttagctgtttactgttccttaattgactgatcaatgttttccactcactttattttcattagaaggatttacttcatgtgaatgatcccagaaaattaaactgaatatgatagaatgtttggtctttcaaatttgactcaaagtggtggtggtgtgggtatagttttttgggcattgcacaggctttgttttgggttttttggtttgtttgtttgcatttctaactatggaagtttttgatgatgtaccctgagttgatttggcactttgcatgtcttcttctgtagctgaagtacacaaagtttcaaggccagaaaatgagcaactcagaaatgataacaagagacaagtaggtaagttcttggatctaaaagtcatattctatgcttctcaacagggagaatattttaaatatatgatacataattactataaaaaaatgaaaggcgggggttgtgactgtaaaggaggagcacaggggagtgtcactgtggtgacagaacagtcctttatcttgattgtggtggtagttttgcaaatctatatatggtagaacatcatagaactatgcataaagacataccaaaaaatgagtacatgtacaaactggtgacatctgagcaaggtctgtagtttagttaattagattgtgcctgtgtcggtttcttggtttcgataatgtaccataattatataagatgtgactgttggagtttgggaagttgggtgatgggcacaagggacgactctgaactagtttttcaatttttcttttctataattactttaaaataaaaagattttttaaaattttacttttctgggcccggcacagtggctcacgcctgtaattccagcactttgggaggccggggcgggcggatcacgaggtcaggagctcgagaccagcctggctaacatggtgaaaccccgtctccactaaaaatacaaaaaattagccgggcgcagtggcgggcgcctgtagtcccagctactcaggaggctgaggcaggagaatggcgtgaactggggaggtggagcttgcagtgagccgagattgctccactgcactccagcctaggcgacagagccagactctgtctcaaaaaaaaaaaaattttacttttctggaaaaaaattctacttagtggtaggcctttttttttctgagatggagtttcactcttgttacccaggctgtagtgcagtggtgtgatctcagctcacggcagcctccgcctcccgggttcaagtaattctcctgcctcagcctccctagtagctgggattacagccgcgtgccaccatacccagctaatttttgtatttttagtagaaacagggctttgccatgttggccaggctggcctcaaactcctgaccttattttccacccacctcagcctcccgaagtattgggattataggcgtgagccaccgcacccagccaggcagttatcttttaatatgttcttgagtatttcctgctagaaggatttgttcgtttatatttacattttcctatggcttctacttttgtggtttttatgttttgtgtcagtttcaagttaggattataaaattggttttcattgttttctatgcctttgggaatggaattttcttcatgttacaagtttgaaacgtttcctcattaaaattaagcccagaggccaggcacggtggctcacacctgtaatctcagcactttgggacgccgaggcgggcaggtcacgaggtcaggagtttgagatcagcctggccatacggtgaaaccctgtctctactaaaaatagaaaaattagctgggtgtggtggcacacgcctgtagtcccagctgctcgggaggctgaggcaggagaatcacttgaacccgggaggcgaggttgtagtgagccaagatcgtaccactgcactccagcctgggcaacagagcgagagtctgtcaaaaaaaaaaaaaaaaaaaaattgagcccagatcctgtttttgaatcagttgtttaagagctgtagttttcttttatgattattgatttaataaggttttatattttctttatctgttttgtaatatataacattctaaaatcattcattttattaatattttcaaatttattaatggaaaataaattataattttacaactcttctaaattaaaaagggaatgtataatctaccttatttagaaaatgattgaaaaatgatctttcacttaattttagaaatctagatatgatatttttagatgtatatgtactcttctctacatttatatatatatatatttttatatcccccccccccgtgttttttttttttttttttttttttttgagacagagtcaacctctgtcacccaggctggagtgcagtggggcacgatctcagctcactgcaacctccaccgcccgggttcatgccattctcctgcctcaccctcctgagtagctgggactacatatgccatggaatacagaattttgtttaatttgactcattatattttaccctttttattcagaaaaagagagagctcccctcccaaaataaaataactgccatactatctttcattgcccttcaaaactcaccccaccaaagaggttcattaacagaacagtgcatattcttcccgattttttttgtagattttacagacacagacatctatacccaaaacctttttttttttttttttttttccccctggagatagaatctcgctctgtcacccaggctggagtgtagtggtgcgatctctgctcactgcagcctttgcctcccgggttcaagccattctcctgcctcagcctcctgggtaggtgggattacaggcatacgccaccacgcctggctaatgtttctgtatttttagtagagatggggtttcaccttgttggtcaggctggtctcgagctcctgacctcgtgatccgcccgccccggcctcccaaagtgctggggttacaggcgtgagccaccgcgcctggccccaaaatatttttttttaagacagaaggatcatggtgtaattctggcttgtggccgaggcatttttaatagtagaggtgaatgtttcaaacatcctacttatctagatttatgtctggatatgctgctgtggggttttgtggtttgttttctcaaacccaggcagtttgccaaacctcagcaaacagcgcaaacctatcttgttaccctgtagtcacttctcatccttgtcagtatgtgtggagcatttcacgcaattgtgatcattaaactcatactggtttctgttctgcgtttttcagttaacatcaaatattcttcctctgtttttttcttgttagtcatttttcttgtgttggatatttgggttcccacgtttttcactataaattatgctgctttgtattgctttatcatgtctcttatgattggctgaaattttactgtgttatagaggagagagaatgtgtagatacaggaaggcttgaataatatagagccatctggagagacacagtaaagatggagtaggaagtgttttgagtcagtaaggattggtgcttgtctgttttttatctgtgatgtggaaataacacctattttcttgcaatttgtgccgattagtgtttatttttcttactataaatcttggttcctgttattctttccataaaaggctttctacattttgagaacccactgtgtgtctggcacttcagtttgccggtgttggggatatagcagtaaggaaaacaaagcccctgacctcaaggagcatacattaatttagtgcagaagcctccacacttgcctggctgtatactctgtcagtaacacatgtgagtgtggactccataaatacaaatgtttagaaattttgtgtgagctattctcagtctacatattaaatattagtgaaacttaattttttattttgtataaaaaatacaaatacaataaaatatatagagagacctgtaagcatttctgttgttgactgttgaatctaaagagcacaatagcaacatctgtgctaaaccagctattacatattgaatgtcctttgtatatattctttattatcatagctccaggtgctccttcagctccaaggagagggcgtgggggtcatcggggtggcaggggaagatttggtattcggcgagatgggccaatgaaatttgagaaagactttgactttgaaagtgcaaatgcacaattcaacaaggaagagattgacagagagtttcataataaacttaaattaaaaggtaagctttgatttttcttttcagaaaataatcttatttgatctgtgaattacagatgtttctcagattaggtgtttttatgtaattcagattagctgtcttgacttttctgatatgtgcttttgttcttagaagataaacttgagaaacaggagaagcctgtaaatggtgaagataaaggagactcaggagttgatacccaaaacagtgaaggaaatgccgatgaagaagatccacttggacctaattgctattatgacaaaactaaatccttctttgataatatttcttgtgatgacaataggtacagtttttaagctgttcttttatcttatgatattgattgaagtgtaaaatggtttcatgtaaattcacgaggtttaatgaatactaccataattgttttgttttgttttgagacagtcttactctgttactcaggctggagagcagcagtgcagtcacagctcactgtagtctcaagctcctgacctcaagcaatcctcccatctcagcctcagtaaaggggactacagttgtacaccaccccacccggctaatttttttcatttttttgtagagatgggggtctcgctatgttgcccaggctaatcgtgaactcctggcctcaagatcagcctcccaaagtactaggattacaggcgtgagccaccacacctggccataattgattttttaatgttttatttgctaaaagaaaatatatactaaagttctaaattattcattcaaaagaagaaataaccatatacttttgtttaaggatatattcatatttgaatattagcaattaaaacaagcatttaggtaatgtctaagtaggacctttttttcacccctgtatgttacagttcaaatgaagccagaaccgaagtgctaatctactttgaagtttgctggtaccataaaactgccagattgtagtaaatgtgggtccagaaaattggcaaattattgagaggttaattaaaggacccagtgtgaggaactaacagttctagaggttctcctgcccaatccaaattgtcattgtccttgtccttttcctggctgaagtttggtgccctctggtggcagttgtttgcttcaatataaacatggatggacataattctgagtcccacgattggctggatgacagcagcaataattcagatacttcttgggttacttggtatcgggtccatagattgggccaggaacataatggggacctaagggcccaccttccatctcctagcttcccaagacaaggcctccctgtctgactttaccttcttttcccttggggctgagtggaaagcgaagtcaattaccaatctcattatatctgaatttccattattttggagctgttactatgtttatcaggtgtatttgcaagaaactaatgtcagtcatgtgttcacatgaagtttaacagaatattacaggaacatattgaactcatatgccatgaacaactcgtgataacttagataagatgcttttttttttttttttttgagatggagtttcgctcttgtcacccagactgtagtgcagtggctcgatctcgactcactgcaacctccacctcccaggttcaggtgattctcctgcctcaaccccccaagtagctgggattacaggcacctgccaccatgcccagctattttttgtatttttggtagagaatgagtttcaccattttggccaggctagtctcgaactcctgacttcaggcgatccgccccctcggcctcccaaagtgctgggattacaggcgtgagccatcacgcctagccaagatgcttatttctaattagctttagtaattacttaggcttaatttgggagtagcactgcatattttggctgagggatattcttttaaacctgatatgctgaagattatttgcttttataatagagaacggagaccaacctgggctgaagaaagaagattaaatgctgaaacatttggaatcccacttcgtccaaaccgtggccgtgggggatacagaggcagaggaggtcttggtttccgtggtggcagagggcgtggtggtggcagaggtggtaccttcactgcccctcgaggatttcgcggtggattcagaggaggtcgtgggggccgggagtttgcggattttgaatatagggtaagtgttactgttaataaattctttggggttgacatgcattttacaagactcaaaacatttttacttgtttttgttttgggtgaattgttttgaggacattagaataacttccattttgacttttcagtagaggatatacgtgattcagatgtatatataaagacattatacaaaaaaagacagtatagtatcacctttatttcatgttaacagaatatacttttaacacccaaagagtctatctaggaagcacatactcccagaatggaagggcaagctttaacatttaatagcagttaacatttatatagtatttaccaagtaacaagacattgttttaaatatttttttacatattaacttatttaaactgcacatcaactctgtgaggtaggttctattattatccccattttacaagtgaggaaatgggtatagagatattaagtaacttgcgaaaggtcacatagctagtaagtgatggtgctgggtgttgagcccagcaagttgtttcctgagtcagtactcttaatttggttttgttgaaaattcactacattttccctggttttctcctttcaccatgaaattgaaaatgtttcgatatattggccttcaggagctactgctagagaattctgtaactctgtatagtagccttatgtgtataatgtagcttttgacaggtgtctgtaaattaagtcagcatagtaactatctcagttaacagtaaactatcttagtttattgattttagaagtagtggagaggaagggctataacagaaaggaccaaaatcttgtaaagagttccacttgtaatagcaacaggcagctggaaacagaaagacctgttagcaggagttccattgcccagtacttaaaactggccattgttgagatctctctggaaagagatcagtattagtggcttttggacctgctctattaattttaatgcttttgatattgtgccatcacagccaagactgccaaaaattatactcaagtcaccagcttatgccatccagccgttggtggccttatgtagttgcgggacttctgacttgcaaaatcaccttcccagctaggagaatctgtcttaggaactccagaatagccctcgcttatcactgttactgcccttaagtttgccagtgacaccttgcttacagaattcagcagtagtattttcacaaatattttatttgccattaactcctctgcaatatttgacactgaccaaccacccaatttggggtctttcttcctagtctttaaaatactcttctaggttttcaatttatactcttcctaattttttaatactcttcattcttttttttggggggtggagggtgtcagggtcttgctgtgtcacccagactggagtgcaatggcatgatcataagtcactgcagcctcaacctcccaggctcaggcagtcctcccacctcagcctcctatgtagctgggactacaggcatgcaccaccatgcccagctaatttttaattttttttgtagacactgggtcccactctcactatgttgtccaggctggtcttgaactcctgggcttaagcgatcctctcacctcagcttcccaaagtgctgggtttataggtgtgccatggtgcttgttccatcctcccttttgtaagcctgtcctggaccctatgtgtttctgcaccgcatctctatctgcactgtttgctgtcagcttaaccttcctcagactgatctcatcatcttccttctctcctgtcatctcagctctgcctcctcccagtgttccatgttggctcatggtatactgcccaggcactagaggtatccatgattgtggcctgttgccatttattcctttgagatgtccctgtcaactaccatggtaacccaccagttgggcttcagaccttcgtctctctttaccccactttaaggcagatcagctacattttgaacaacctgtgacaactccttgttgaagaccacattgagtcagcttggtctgagaaaaagtacatttaaattagacttggatccagatgagaataatagcagtagttactagtatgacctttcagacccttggttttgacatttgtgaataaagagttgcaccatttattctgaaataacaccttttaaagatcattaaactttcagagttggaaaacatctgagaggtctgacctggttaaaacataaacctcttctgcagtatctcttataggggctgggagcttactcttcccaagggcatccatcccaccccagggatgttctaactgttacaatctcagctgggcgtggtggctcacacctataatcccagcactttgggaggctgaggtgggcggatcacctgaggtcaggagttcgagaccagcctggctaacatggtgaaaccccgtctctaccaaaaacataaaaaaaattagccgggcgtggtggcacacacctgtaatcccagctactcgggaggctgaggcaggagaatcattgaacctgggaggcagaggttgcagtgagccgagatcacgccactgtactccagcctgggcgacagagcaagactccgtctcaaaaaaaggaaaaaacaaaccttccatgcagtaactgtgtgtgctccatgtggttactaatacaaacatttttttgacaccatgtcacactgtttatcattttgagccttttgtaaaactcgtatcacatatattgcagaattgaaaatgcattgtcatagttacctccatgcatctttgtctacgctcctgtatccttgacagatagtccagcctctgcttaggtgttgccaggagtgatggactcagcgaaccctcaggcatggcccagtgtttaggaggctcagttgtgacattgtagtccctgctcttcttaattgtgtgaggatcccacttgatatatttggcctcattcctcattaccctttaacctatctgattcaagcaagctgcctcatggttatctcacatacacattgtgcttgattccaactccatccccattcatttaccaaatatacagaattcttcagatatgccaggcactatgttgagcattggtgctgaccgatgtaggcccagcccttttgatgtttacattttggtgggagacagacatagctaaaagtcaggtcccccctttcacttatcctttacagccttgcccaagttttgctctgtcttctcttccttcctacactgatttcctcctcttctgacctgtggctatctgctttctttggcacacattttaaatacactgacattccctattttttgtatttagttttgttctgcatcaccagctagatgagaacctcttggctttagtgaatatgtattctacttttctttccatgacaacactcagctcaacatggagccatagtgggcttgaagtaattgcttgtcatgttgattaggaatttgccactccagccttcagtgagaccaaaggtctgtcaatgtagctagcctttgattgttcattccagagttgaataatcctttcatctgccactagagccccgaacccagcagccctacacctcctaaatcataaaatcatttcacctggcacctttaaaggtagaaaatggtgagtgatcactgtcacataaaggagatttaccactgaagattaaacttgtatctgaaacatctaacacttcctcccagagatggacatggatgacatttctgcagccttcatgaaatgagttggctttattttttgtgctatattagcatgagtcattgtggtttgggggtaagcataaatgagcttggttgtttaatgaaaacatgggtaaagataaaatcataaagttttagaatccttaaaagaatcagccaaactagaatctctacgctaccacactcacattagatgataaggaaactaaggaccccaagaagttaattgtcatgattgaggtacaagctaacaaatccaaaactcactctcttgacttgtggcctgattttccttaagggtaatattgtaaatataggccagtgcaatggtgtacacatgtaataccagcattttgggaggccagggcaggattgcttaagcccaggaattcaaggacagcatgggcaacataaggagtccctatctctataaaaaagtttaaaaattagctggagtggtggcacatgcctgtagtcccagctactcaggaggctaaggcaggaggatcagttgaacctgggaggtcaaggctgcagtgagccatgatcgcaccactgcactccagcctgggtgacagagcgaggcctgtctcaaaaaaaaaaaagaaaagaaagaaatataaccttatggtaagtttggttgtatggtgttttccccctcccaccgcccattcttttttgaggtgagaatggaaatcaggactagcaataataatgtaaccagctcctgttttatatgctgctgtcagggaggttaagccaccatggtgggtgataaaaatcacatctgtgtttcctcagatggggttcaaagacaacaaggtgtctgaatgactcagcataatgctctctctcctctccccctttcattttctcctttctccctctcctgtccccatctctttctctttttttttttttttttttttttacctttcagaaaaccacagcttttggaccctaaaaggtctggattgatcgtactgctttctgaaaggtaaaaaaaacaaatactttgggaggtgtgaaggttggctttgtgggggacagcaggttcatcttgtagctcattgctgtcaacttatgccataccatatgtatttcagtttaataacggggtgcaaatgttttggtgttgtatacacagatgaagttaagtctcacctaggaaatgtctgtttctaacagttggggtgagaatcagcagtaaaaaccaggtatatggtagcagctggtctagaggaaaataaaagcccttggctccagccctttgtacaggcctttagtttagggtcagtctctctggaaatcttgagatttttattgcttcctcactggttactttttaaaaattccccagtcagctttctacttttcagagcttatttcagatttaagagttatccttgtaaaattgatttttaaaccattgcttcctcctggcatgaaattttggagagaaatgttatactgactgggtattttattgcttagtaaagacatcaaagacttggggattttatgaaacttgtttcaaagtatgttgacagttgtatttgatgagtttgactattgagttgagggtttaagtcctatcactgcttttaaaaaattattagggagaacaaccaaagatgaggaagtatgcctgtattttggggtggggttcaccactgcattaacctctactgactggaagatgcagtcaacaatgaggtactactgagtatggaagttatagaaggagtttcgtggaaatgagtgagacaggtttttctatgaaagtaaaagtgggggagtatatttaaagataatttaaaataaacttgagcaaagtaaaaagaaaataatacaccaataatttggaacatgagctaaatttttttttcttttttagaaagacaacaaagttgctgcatagtctacaaacaagtctctgaaaataggtgaatttctagctcttcatggtcctgaacattgatttcagtctttgcaaagaatgaagaagtgaattcgctgtacatttgtcaccagcactgggtttttgttttttgtttgtttttccgcttaatttcaaagataaaatgcagttacttttgggggtggaaggctcatcttaaaacatgagcattaaatatatttggaatagcagaaggttaagtaatttcttatgtatagttaaactaaagcagtacttcagtgggacttaacaagtattttttcatcactgaaaggttttttttttttatcactaaattgtatttggcaattgcaagttgcctgcagatagggccgtgatactgtgttttgagccacagaaggttgtgtgtgtgtgtgtgtgtgtgtgtgtgtgtgtgtgtgtatgtgtgtgtctttttcctcctttcttttggggaatcctgtaatatgaggtagcttatttcgtcaattaattagggtgctggatggtagagaattttgtcagtcaactatgtacacacagtaaatactgtttcttaggcaaaggtaacttttttatatagttgtaaaattccattatattccattgccaaagaaacattaagaactttgtatagctgtataaaaagcaactaattttttaaagaataaacattttaaagtcagcaaacatactgtgtccttgcagaagttgatgtgctgagcagcagccttatgggtgggtctttttttcttagttttccaggcttaacatttttgattttgttttttaatgtttggaacataaatgaagatttgatacattatttcattatctaaaaaggattaattattcatgctcattgtaagaacttcattttgtagcaaatggcatatcacaggatctgtccagataatcgatattttcagtatacaaatgtaaataatcacagatgagaatgtacttagctgtattttcaaataagtaatcttccccccttttgtaggactttaaaactaggcatcaatgaacctgtttttcctattatgcctggaatttagtcatgataccttgactcattccatcatatttcaagaggattcagagtgctagaaattattttggtagcctgtaacacacggcaacactggtccttgggcctatgatgacccacagatgactcagtatagagttcattgctaattataaattactagtgaatctttttgatattttaagctctagtgggaaaaatctggccacttttgtgtttttatgaaggccatggaataaaaggatccaaagatttaaatatttttatctaatattttgattgttttcttaactttctccttaaaacattcagtagtgataaagatatagaaactgcactgtaggagaattggaatatttaaggctggttgacattttttattttcattttatatcttttgtatagctctacaaggcagtgttttgtaatttggtttcattatgaagatccagtacttggcagccatagtttagacaatattgttcagtgctgtttgcttgcatgttaacaacaaaaccttttagaggacccacaaatcatgatattgaacacagttccgaggcattcagagcatcagagcaagtaccatggcaatacatgtgtagactgttggagatgtcccgggccaatttcaagaaagaaaactgtaaatactagttctacttgctctgaaattatgagtttatgcgttttcccagccctccgaatcactgactggggcgttttgtgccccagcaataactggcagcatggcatacctgcagtaccccttacaatattaaagcaaagtttttattctaaaacagaataaaactgttcaataaaaaatgctcgtcaaagttctttctctttaaatagtaacattctgtttcagtaggaacataatgaaaggaatcttttaaatggaagagcggaattataatgtttgtattccctgtaataactataaatcagttactttatttctaagattgagttattgttgcagatgtttagggaaagctaaaagccccttccttcccctcctgtgtgtaaataaaatacttctgagatcagatccgtgacatgaggagattgagccacccaggcacaggccaggctggaaacagcagccagaacacactccctgtgggcagacgcatgaagaagatgcagaatctgtctattaaaacagttcgctccaaaagctgggcttcatgtgatggtagggcaagaggtcgggaacagcagtgcagcacagtggctctcggtggggttacctgacatcctaggaacacagtcatctgttgcttaataatagcgacatgttcttatttttaaatagcaatgaggtctcacttcgttgcccaggctggtctctaactcctgggctcaaatgatcctcccatcttggcctcccaaagtgctagattacagacatgagccaccaggcccggccatgacacattctgagaaatgtgttaagcaatgtcatcattgtgtgaacatcagagagtgtactacacaaatgaagatggtatggcctactccacacctaagctatatggtgtagcctgttgctcctcgctacaaacctgtacagcatgttactgtactgaatactgtaggcagtcataacacagtggtatttctgtatttaaaacatatctaaacagaaaaagtatagtaaaaatacggtatcataatctttgggaccaccattgtatacccagtccatcgttgaccaaaacatcattaagtggtgcgtgagtactgaggaatgtgaggggatgtgttttggttgtcacaatcactggggatcaccactggtatttaaaagtaagggcccggatggtaaatgtcctgtgctgtgccacacaatcagttgtccaacccaaagtgcagtagtgctcctctactctgagaaacactggctaaagtccctccacatggaaagacagtaagtgggaaattatttcctgccaacttgaaaaaaaaaatttactacttaggaaattgtccgcttgggaatattaataataaagggaacttacttcctgtagcacatcagcattgtggaaacattaccacataggagttagggcttcatcctgttctctgtcagtgcttcacaaatctctgatcagaatctaccaaggagcatttttaagtacagattcccaggcccagagagtgattctgaagttccctagtacagcagaacccaacctttttggcaccagggactggtttcaccaaagacagtttttccacagatgagcagggggtatggttttggggtgattcaagtatatttattgtgcactttatttctattattacattgtaatatataatgaaataattacacaattcaccatcatgtagaatcaatgggaggcctgagcttgttttcctgcaactagatggtcccatctgggggtgatgggagacagtgacagatcatcgggcatgatcagtgagtgcgcaaccgaggtcccttgcatgcagagctcacgatagggtttccaaccctatgagaatctaatgctgctgctgatgtgacaggaggtggagctcggatggtaatgctcactcatcagcccgcctctcacccgctgtgcaggctggttcctaacagaccacggaccacgaccgttctgctgcccagggatcagggaccccttctctagtaggtcctaggaatcttactgatcccacaggtagttgtgattagctaggtttgggaagatgactgtacaacaccaaagctggttcctgctttgggggtgttgatatattttccacagtaggattatcttagcatttttcccatccttccaaacccagtatatccagattgtgactggggcatgaagagagggatgggactaagtggaaaggagggaacagttttgcaggatggaatcaggggaaatggggaggttgagactcgagtttcctccagagtttgggtgctttgagtactgagttttatttcgtttttattcctggcatagggtttgtgttccttctgtctcttaattttgcatgccagttgtccctgcctctgtgggttctctgcccatcagagaagccgctccttctgcagggcccctctgtccacagcatggctgagaagcaacttcttttcctgagaagggttacttaggccatccaatcacatctggattcagtgtgttgcaggatccccctgccctgttagttcagagattaagctgttttacatagtaaaggtggggagagtgtcatggtataaagtaatccaggtgaatggtctcttcctgtaggagtgcaggtgtcaccaatttgctttagtttacctgtcccgactggttttggggtttttttgagacggagtctcactctatcacccaagctggagtgcagtggcgcgatcttagctcactgcaacctctgcctcccaggttcaagtgattctctcccctcagccccccgagtagctgggattgcaggcgtgtgcccccacacccagctaatttttgtatttttagtagagatgggatttcaccatgttggccaggctggtctcgaactcctcacctcaggtgatccacctgcctcggcctcctgaagtgctgggattgcaggtgtgagccactgtgcctggcctgttctgactctgtttaaaagataacaagtattaggctgggtgcggtgactcacgcctgtaatcccagcactttgggaggctgaggcgggtggatcacgaggtcaagagatcgagaccatcctgaccaacatggtgaaaccccgtctctactaaaaatacaaaaaattagcctggtgtggtggcgggcacctgtaatcccagctacttgggaggctgaggcaggagaattgcttgaacctgggaggcggaggttgcagtgagctgagattgtgccactgcactccagcctgggcaaaaagagcgaagctccatctcaaaaaaaaaaaaaaaaaaaccacgtattattagtaaaattgaaatcaaacttagggaagtatcatagtaccattaatctgtcaatctgaagatgctaaaaggagatttgcttagcaggctgccttggcttctccaagatggggagacagacaacttcttggaagcagtgtcctccaaacagaaattggtcaaggaagggaagtgggagagagagctttgactagcagaggcttggaagccagccagccagcagccaacagtgcatgtgtgcattgggaagctagtggtccagggaccaggcactgctcctgtgggatccatcccagccctctaaggagcggtgcaaaggttcttatcctatttatcggagccagtgtccagaaaaggaagcttgtggtttgagacattctgtaaatccggttccaagagcacgaggtaggactctgaatccgatgtggtttctgttctcggtgatggtgcagagctgtgagccagtggtagggtgtcctttaaattccagctcagtacactagttaatgaacttggctgactgataaaaatgttttcaggtttagctcatgaacatatcaacatagacctaaatataattccagtttgtcatgaatgttgattttttgaggaaatgctttaaaatgtactgatgcccatgttgtggttgtaaggaaacaaagcagctctgtgaggccaaagcatatttcagttcaatagtgaggctttcttagaaagaatgactcatagtcactcagagttgagtcgcacagaaacaaccgagagcagacagcaaggaacggcagggcccagaaggtccagcctttccctccaggctgaagggttagggaagatcgccaaccttaaagggggtgtgagaggcctgggcccaggtgagattgtactgaattccagtaaacagtgtacagtcattccaggacagaggacaggaacatgtttactaggtgtctggagtgcacctctataatcctcatacacactaatccagataatcctgggatgctggcctcacgcaggattgttgatgagaatgcaaatcccaacattgcaattcaggattttgcttctactgaaagcattttgtcaatgttctcttttggggttagctgggtgacagttctcccttgctggattcccagtacttaatagcgtttctttgactcagtggatatgtggaacattgcagactgcaatttataacacagaactgggtatatattttcattataaaagtaatacatgtaaaaagaatgcaggcctcttctctgattgggtggtatttttaaaaagaaacaaagaatgcaggcagtgtagattatgtttgttttttaaaggaaagagaagaaaaaattctctaatcccaccacccacagctgaccatgttgacactatttgggtgtatattctgtctggcattatcctgtacaggcatatgctcttcagcaaaaatggatttggccgggcgcagtggctcagcctgtaatcccagcactttgggaagctgaggcaggcagatcacttgaggtcaggagttccagaccagcctggccaacttgatgaaaccccatctctgctaaatgcaaaaattattagctaggcatggtggcgggttcctgtaatcccagctacttgggaggctgaggcaggagaatttcttgaacccaggaggcagaggttgcagtgagccaagatcgcgccattgcacttcagcctgggtgacaagagcaaaactccatctcaaaaagaaaaaaagaaaagtagatgggcacagtggctcatgcctgtaatcccagcactttgggaggccaaagcaggaggattgcttgagcccaggaggttgaagttgcagtaagccatgaccacaccactgcactacagcctgggtgacagagtctaaaaaaaaaaaaaaaaaaaaaaaaaatccacatttctaaatgggaaaatctgaaggccttgatctgctgccaagggtcattggctgtgtcttttgaaacatttttattatgaaagtgtcatgtggttataggatatgagctgcttcagcccggcacggtggctcacacctgtaatcccagcacttttggaggctgaggagggcggatcacctgaggtcgggagttcgagaccagcctgaccaacatggagaaactccatctctactaatcatacaaaattagctgggtgtggtggtgcatgcctgttatcccagctactcaggaggctgaggcaggagaatcacttgaacctgagaggtggaggttgcggtgagccgaggtcactccattgcactccagcctgggcaacaagagtgaaactccatctcaaaaaaaaaaaaaaaagaaatgagctgcttcaaacaggtcctcactaaagaccaatgactggcattgcctgagcaacatagggagaccttgtttctacaagttatttatttatttatttatttatttatttatttatttatttatttatttggagccagagtctcgctctgtcgcccaggctggagtgcagtggcacgatctcggctcactgcaagctctgcctcccaggttcacgccattctcctgcctcagcctcccggcagctgggactacaggtgcccgccaccacgcccggctaattttttttatttttagtggagacggggcttcgcagtgttagccaggatggtctcgatctcctgacctcatgatccgcccgcctcggcctcccaaagtgctgggattacaggcgtgagccaccgcacccggcctatccaagtaattttttaaaaattagctgggcgtggtggcgcgtgcctgtagtcccaactacttgggaggctgaagcgggaggatcacttgagcccaggaggttgaggttgcagtaagccatgaccacaccactgcactccaacctgggcaacagagcaagaccctgtctccaaaagaaaaaaagaaaagtacacatcataattacctatgtaaccggcacccagattataaatcagattattaacagtaccccagaaacccaccaagctcccttccagtagtccccatcccttcaaggctaactacagtcctgacttctgacaccatagattacctttggtgtttttatataaatggaattacacagtatatactcttgtgtttggcctctctactcagcattgtgtttgggattcatctctcttgttgcatttggccatggactgttcattttcattgcagtataatattccattgtgttaatagaccacagttgcttctttctactgttgatgccgcatttgggtggtttctagcttctggctattaaaataatgctggtactgttttttccttcgggagagaagccagaactagagtgggtgagaggaatgctgacctagccctcttgaggacttggagcatggtgaaccatatggtagtgctctgcttgtcactaaccataaagtaccatacaaccctgatgtacagtagacatagatgtagataatggtatatattagagcagatccagagtcaatcctccgtgtgcctagcctcagtcccctaaggacagtgctcccccattgcccttactcactggcagcagtggaatatttcttgccctacaaaactgtgttcaggatgtggatgcggtctccttgcttccctgctgataaaaactcctaccccagtgaggttatgtgatcctctcactctcctggtgatgaccatttaatgacctgatctctgcccatcatatcgtgagaagtctgatactcatcttcctcttcctctccccttctgtcttattcaaagtgacttcagctgttgtgtgatctacccatctgtactgggggtccccagggtaatcgcacgcatggctatgacagtgtacagtgacaggatacagtgacaggatacaaagcaaaattcacaaagggaaaagatgtgtgggcaaagtctggaggaaaccaggctcaaacttgcaacggggacttagaaagcggagcctcacgggatgtgcttagcttctccagcagggagttgcaacaacatgcgtgggatattgtctgccagggaagcttcagacttagttgcccagggtttttactgggggctgattatgcagacaccctctgcgtggcacgtgccaaaattccaggctcccagaagtaaagcacaagcaaaccacattgtttacaacagtctggatacagtgcaccactcctaccagttctgggaatggcgggaaccctcctgaaatccagatgtcaggcgagagccaaacttacaagcaggccttgtaaatgacagcagtcaaacctgcttcgttaactcctctgcacactcgcccacaccctggcttccgtccttgtcctgtgacattttcctgttgtcccctcctacccaaagctgtagacacacctggaccttgtccatcaacctcaactgcaaccacctccaaatcacagacttagacaccccgccctttgaccttccagctgtcttgctgaagaaatagctaaaaaaaaaaaaaaaaaaacataaaaaaattcaggccaggcgcggtggctcacgcccgtcatctcagcaatttgggaggccaaggcgggcagatcacgaggtcaggagatcgagaccatcctggccaacatggtgaaacctctgtctctactaaaaatacaaaaattagctgggcatggtggcacatgcctgtaatcccagctactggggaggctgaggcaggagaatcgcttgaaccccggaggcagatgttgcagtgagctgagatcacgccactgcactccagcctggcaacagagtgagactctctctctcaaaaaataaataaataaataaataaataaaaattaaaaagcagtgacctaacccattcccttccttagtaactgtttttagcctggtgcagaactccaggtccagaatctttatactttctccggcttcattagttcccccgtgctttctccaccgccatctccaaccatcctaaactccatgactcactcttcatttatcttgcaaataccctaaactcctttgcttctcttttgagaagctcctgcctagagaaacttcaaccctaaaagcatccattcatccacattgtcaatgtcttcacccagggggttgagtcctgaggacaagaatcacagttgagcaaatcaatgccactgtaaataatgctgattactaccctcaaccttggccctcaactttgtatatttatacctcaaccaggtatatttctttgtatatatatacctcaaccaggtgtatttctgtaatcactgtgcccttaactttgcatcaaaaccagtatatttctgtaatcatctctctgcagtcagcaagtggtcttaccatctatttcaaagacagctggtggctgttggatgaaaacagtttcagacgcttaccacactctaaaccagcctcatctgcatcccaggccctattaaaaggaggtaggggctgggtgcagtggcccatgcctgtaatcccaacacttcaggaggctgaggtggtaggattggattgcttgaggccaggagttggagaccagcctgggcaacatagcaagacctcatctgtacaaaaaatttaaaaattaactgggcttgctggcacatacctgtagtcccagcttcttgggaggttgaggtgggaggatcacttcaaccccagagactgaggctgcagtgagctagctatgattgccgaggcaggtaaatcacttgagcccacgagttcgagatcagccggggcaacatagtgagacccagtctctaaccaaaaaagagaaaggagattattctggggatcctatacctcccactcctgtttaactgtcaggattcctgaagtgaagggagacttcacttctcaagccacttgacctattccactgaaacagttcttggtaagatcaccaacaatctccagtgagcatttttgttttgagacagggtctcactctgtcactcaggctggaatgcagtggtgcgaacacagctcgtttcagcctcctgggcccaggcgatcctcccatctcagcctccagagtagctgggactacaggtgtgccaccacaactggctaattttttaattttttgtagagacatagttttgccatgttgcccaggctagtctcgaattcctgggctcaagtgatctgcctgcctcaacctcccaaagtgctgaaattagcacccagctgtatgtattatcttggttttgtttttgtttgtttacaattttttcccctggagtttctgattggctcttggatgttctctgttacttggaatctattccactctccttgtactcaccaactttctagtttaattcagaccatttcttctttggacagttattttctgtacagcttttgggttttcctggagtttctgaatgtttgttcttgctggtatttgttgcctttatcatattctcaagtttttccaactcctcacccatactataattcagtctacaaaatctcctttttttcatacagactgttcttccataaccttccaccattctgctaagatccaaacaggccaggcatggtggatgataccaataatcccagtacattgggatgctgaggcaggcagatcgtttgagcccaggagttcgagaccagcctgggaaacatagtgagatcttggtgtctaataaaaaagaaaaaaaattgaaaaagataaataacaaataaaacccaaatatattgcttccaggtgtcaacaaagtcatgatcctgagattttgccatcactgctctcctgggctacaattagagttgctggcaccatgttttccattcctttgtttactggaatttctccttagggagctttctagacaggaaggtctctgtcacatcttcttcctcgtttcttttttttttttgagacagagtctcactctgtcgcccaggctggagtgcagcggtgccgtctcggctcactgcagcctctgcctgccagcttcaagtgattctcctgcctcagcctcccgagtagctgggattacaggcacccaccaccacacctggctgatttttgtatttttagtagagacaggatttcaccatgttggccaggctggtctcgaactcctggcctcaggtgatccgcctgccttggcctcacaaagtgctgggattacaggcatcagcctctgtgcccagccccagccttctttgcttatttaacaacaaaacgtcgaagcaattcttatcttagttgctgacccttgatctagcatgcagtgatgttaagtctaatgccaatttgattttttcttttcattgtagattacctgtttcttcctctgtggaaacagcatattatcctttctgttaagaaatgttatgacttctcaagagtgtgggtctttttgtttcactccagtattatgctgggcagttgttaggcccttttgatttaatggtttgtgtcttccctttagcttgggtaatttttttcataccatcctccctgtactttcactagaagtctcttttactcagatataagagctgcccattcggccgggcatggtggctgacacctgtaatcccagcactttgggaggctgaggcggtcggatcactcgaggccaggagtttgagaccagccaggccaacatggtgaaaccccatctctactaaactacaaaaattacttgggcatggtggcacatgcctgtagtcccagctactcgggaggctgagtcaggagaatcgtttgaacgtgggaggtggaggttgcagtgagccgagatcgcaccactgcactccagcctgagcgacagagagaggctccatctcaaataaataaataaataaataaataaatccctgtatctcttagttttttctgctattttctttcctttgctattgttcatcttagtctctttcctgtagtaggctttattaaaatatcagtggattcttggctgtctgtcattagaaggaggcaaacgggtgccctggagctctctgtgtgaccaggatttgttaaccagcagtgtcagctttaaggtagtgatctttattcttgagatttccgaattccagagggctttgttgtaggatgccaatctctccagatcccacagatgtctacagagaagaatcttccttttttttcttttaatcctgatatttatttatttatttatttatttttgagacttgagtctcgctctaacatccaggctggagtgcagtggtgcgatctcagctcactgcaacctctgcctccgggttcaagcaattctcctgcctcagcctcctgagtagctgagattacaggcacgcaccaccacacccagttaatttatccatttatagtagagacagggtttcaccatgttggccaggatggtctcaaactcctgacctcaagtgatccacctgcctcagcctcccaaagtgtggggattacaggcataagccaccacacctggcctatttttattttttttttttttgagatggagtcttgcactttcgcccaggctggagtgtagtggcacgatctcggctcactgcaagctccgcctcccaggttcacgccattctcctgcctcagcctcccgagtagctgggactacaggcgcccgccaccacacccggctaatttttgtattgtaacagggtttcaccatgttagccaagatggtctcgatctcttgaccttgtgatccgcccacctcggcctcccaaagtgctgggattacaggcgtgagccaccgcgcccggcctatttttattttttgagagagagggtctggctgtgtcacccaggctggagtgcagtgacacgatctcggctggctgcaacctctgcctcctgggctcaagccatcctcccaactcagcctcccgagtagctgggattacaggcacacaacaccacgcccaactggttattaaattttttttgtagagatggggtcttaccgtgttgcctaggctggtctcattctggtctcaagtgatccacccacctcagcctcccaaagtgctgggattacaggtgtgagccactacgcctggccctgtgaggtatttttcagcagctttctagactgacaagagcagctggaagcatggcaaccccaggcagagcatagcgtgctgccgcctcgactgtgctcaaggggcgctagcgtgcgggaggagccacctgcctgggcctctggaaggcttctgcctctgagccagcaggtacaacagggaacaagagtgagaaggggacttgaaaacaggaaacctaattgaaggtctgcacaagtagtgaacaaacctgtttctcactgctgcagtcggcatggcttataattaagcagcatactgttacaaaaaacaaacaaaagaaagagtcttggctgggcgcaggtggtttatgcctgtaatcctagcactttgggaggttgaggcgggtggatcacttgaggccaaagagtttgggaccagcctgggcaacacagggagaccccatctctacaaaaaaaaaaaaaaaaaaaaaaaacaaaacaaaacaaaacaaaaaaaacactaaaatattagccagccatggtggcatatgcctgtggtcccagctactcaggaggctgaggaaggaggactgcttgtgcacagaaggtcaaggctgcagtgagctgtgatcataccattgcactatagcctgggcaacacagtgagaccctatctcaaaaaaataagtaaaattttaaaaaaaattaaaaattagccgggcgtagtggcgtgtgcctctggctccagctactcaggaggctgaggcaggaggatcccttgagcccaggaggttaaggctgcagtgagccatgattgtgtcactgcactccagcctgggcaacagagccagactctgtctcaaaaaatatataaaaataaaaaattattttagaaagaaaaatacttgacaggcttattcctgcccaattcaatttataactgtttattcatgtgttgacatcttaatgcagtctttttaaataaaagcaacttcattaagaaagtaaaggaataaaagaatggctactccataggcaaagcagcctttaaggcagtctttttttttttttttttttgagacgaagtttccctcttgtcgcccaggctggagtgcaatggcgcgatctcggctcactgcaaacttcgccccccagattcaagtgattctcctgcctcagcctcccaagttgctgggattacaggcatgcgccaccatgcccagctaattttttttttttttttttttgagacggagtttcgcttttgttgtccaggctggagtacaatggcttgatctcagctcactgcaacctccgcctcctgggttcaagtgattctgttgccttagcctcctgagtagctgggattacaggcatgcgccaccacacctggctaattttgtatttttagtagagacggggtttctccatgttggtcaggctggtcttgaactcccgacctcagatgacccgcctgcctcggcctcccaaagtgctgggattacaggcgcgagccaccgtacccagccagggcagtcttaaaggcaaagaaggtgaacatttgtgcttaatttcccatctagagtgagcaaatctctctgcctctaccctggttcaaagccccttcacctcttgcgtggactatgttaacctcctcattggttatcctctcttcatactgcattcttctgtgccatattctgtgcagaggccagaatgcactttggggaacacaaatctgattgtcaaattctgtcacatgtcttagagaaggcatctaatctggatgccttaagagatggtggccaggcagggtggctcaaacctataatcccagcactttgggaggccaaggcgggtggatcacttgaggtcaggaattcgagacagtctggccaacatggcgaaacctgtctctaccaaaaatacaaaaattagttgggcgtgatggcgcatgcctgtaatcccagctactcaggaggctgaggcaggagaatcacttgaacctgggaggcggaggttgcagtgagcccagattgtgccactgcactccagcctgtgcgacagaatgagactctgtctcaaaacaaaaaagaaaaaagaaaagatggtgtccttctggaagttgtattgccgcaactatggtctgatgggaatgagatcatggtgtcaaacagacccatgctaaggcagcccccaggcagagactcctctccccatggcctcagtactggtctagaactctgagtcatagatctaaaaataagtcacagggctgtgagctagcaggacagctgcacacctctgggtctgtggcaagccagtggtccgcagtggggatgccctatgtccagcactgctgctgctccttcgtctagaggccttccttgaccgataaagcaagcaatgctgggtagcccacaccccctataactttggcctggaggtgtccctggatcagatgcctgtctgagtctggcttccagactgtcaatggcttgctctgcagctttcaccaacccaggtcacgacttgtgcttacaacacctctttggccgggcacggtggctcatgcctgtaatcccaacacttgggaggcctaggcgggtgggtcacttgaggtcaggagttcaagaccagcctgatcaacctggtgaaatcctgtctctacgaaaaatacaaaaattagccatgcgtgatcaggtggcacgcacctgtaatcccagctactcgcgaggctgaggcaggagaatcacttgaatccaggaggcggaggttgcagtgagccgagatcgcaccactgcacgccaggctgggggacagagcaagactccgtctcaaaaaacaaacaaacaaaacacctcatgtctgggccagcctgctttcctcctcttttagctggtacttggtttaaatctggaaatcctggagtctttggaattccattgacctgagctgggttactgtcctggtgtctgtctctagcacggttggaaggtaactgttcttatgaatggaaaggaggtgttggtgtcagatgtgtttatagttgcattatctcaacttgaacttcgtcttgttctcacctaacttgaggaagcaaggaaatttggaattcaaatattctaataatatttgttattaagtgaggacattcaaatcatacattcaaatattagtaatgtctgttacagcaaactaccagaaaaggacagcaagctacagatgacctggcaatgatgagcccatagggactgttagtgggaaggctgacagttcctggcacgagccccagggtgccttctagagcaggctaacatcttctcacacttgatcccgcccctgctctcccatgcacaaacggggtgtgcaaacagtctgtttagcttttcaaaaataaagaggaggccaggcgcggtggctcatgtctgtaattccagcactttgggaggcgcaggtgggtggatcacttgagctcaggagttcaagaccagcctggccaatgtggtgaaagcccatctctactaaaaatacaaaaattagctgggtgtggtggtgtgtgcctgtaattagctgggattacaggtgcgtgccagtactcgggaggctgaggcaggaaaatcacttgaacccaggaggcggagattccagtgagccgagatggcgccattgcactgcagcctgggcaagaaagcgagactctctcaaaaaaaagaaagaggagctgtccaggcgcagtggctcatacctgtaatcccagcactttgggaggctgaggtgggtggatcccttgagatcaggagttcgagactagcctggccaacatgatgaaaacccatctctaaaaatacaaaaattagctgggcgtggtggcatgtgcctgtaatcccagctactcaggaggctgaggcagcagaatctcttgaacgggggaggcggaggttgcagtgagccaagatcacaccagtgcactccagcctgggcgacagagcaagactccgtctcaaaaaataaataaataaaataaaataaaaataaagaggagattaaaattctcagcaaactagaaacagatggtaacttttttttttttttttttgagacggagtcttgttctgtcacccaggctggagtgtaatgacgaaaacatggctcactgcagcctccaactcctacacttaatcagtcctcccacttcagcctcccaagtagctgggaccacagccgtgtgccaccatgcctggctaatttttgtattttttgtagagatggagttttgccatgttgcccaggctgttctcacactcctgggctcaattgatcctcccacctcagcttcccaaagtgctgggattacaggcgtgagccaccttgcctgccctacaattaagtaaaatatcaaaatacagaaacatcatttgtttctgtctacaagcaacaagtaattagacaatgaaaagtcaaaacattgccatttgtaatagtaccccaccaaaacaataaaatacctagcaatctaatgaaaaatgtgcgaaaaatgtgcaagacttctacactgacaactgcaaaacactgttgggaaaagagcatatcttcaagaccttggagtaagcagagaggacacaaaaagtgatcatgtctttgaggctgaggtaggaggattgcttgagcccagcagttcaaggctgctgtgagctatgattgtgccactgcactcctactggacaacagagtgagaccctgtcgtaaaaaaaaaaaaaaaaaaaagtgactgtctgcaaacaaccccattaccccctccaccaccaagagcacttggctgtgaaaacccctttcctgaaggctttaagatattcccactgaaactaacatgtaaaacccagcctagaagccctgacttttatttccataaagaatgcacaagccaacagtaataactttggctacctaagaaaatcagttctggaatccccgaggggccctgtaagtgggatgttctgattctgcagcttttctgacaataggaatgtgaagcccttagaaaagccagccggagcaaatctgctttttttctcagcagggagagccagctcctgctgagatcagggtacattttctttctttttccttttctttttttctttttttttttttttttgagacagagtctcactctttcccccaggctggagtgcaatggcgtgatcttgactcactgcaacctccacctccccggttcaagcgattctcctgcttcagcctcccaagtagctgggatgacaggcacctgccaccactcccagctaatttttgtatttttaatagagatggggtttcaccatgttggccaggctggtctccaactcctgacctcaggtgatccgcccgcctcagcttcccaaagtgctgggattacaggcgtgagccaccaggccgggccttcttttttttttttttttttttttgagatggaatctccctctgttgcccaggctggagtgcaatggcgtgatctcggctcactacaacctccacctcccagcttcaacctcttctcctgccttagcctcccaagtagctgcgattacaggcatgtaccaccatgcctggcaaatttttgtatttttagtagagatggggtttcaccatgttggtcaggcttgtcttgaactcccgacctcaggtgatccgcctgcctcagcctcccaaagtgctgggattacaggcgtcagccaccatgcccggcctagggtgcatttctttggcatctctcacaaatgtgggtctcgttcatcccagctcttgggtcacagaggagctcctgaagcctccttccactcatttgtcataggcaccaacctcagagacgctcatgtttttcacgggacccggctctaactctgcctctatccagatgcacagggggccagatgcattccggagtgacccctgtttcctggtcttgaccttcttggcctcctaaacagcaaattacaggtataggtctggtggtctctaaggcaccatctcatgcctgtgtggatgctgagggtccagttcacagacctttctgcagagctggaaggccgtagctaccattcctgaagatgagggcctggcctccatctttagacctgtgggctccatccctttttctcttttctcttcccttctcttttttctcttcttttccttcttttcttttctttctcttttcttttcttcttttttttttttgagacaaggtctgactctattgcccaggctgtagtgcgcagtggcgcaatctcagctcactgcaacctctcactcctgggctcaagcgatcctcccacctcagcctcccaagtagctgggactacaggtacatgccaccatgccaggctaatttttgttatttattattattattattttttgacacggagtcttgctctgttgcccaggctggagtgcaatggtgcgatcttggctcactgcaacctctgcctcctgggttcaagcgattctcctgcctcagcctcccaagtagctgggactacaggcatgagccaccatgcccagctaatttttttgtatttttaatagagacagggtttcaccatgttggccaggctggtctcaaactcctgacaattgtgatctgcccacctcagcctcccagagtgctgggattacaggcatgagccaccgcacctggcctaatttttgtgttttttgtagagacagggttttaccatgttgcccaggctggtcttgaactagtgagctcaaacaatcctcccacctcggcctcccaaagtgctgggattataggcgtgagccacagcatctggcctccatctttttttctcaacactttggtgcaaggaacttgaaataaagaggtggcatgacatgacgagtgcctcaaacctgtgtagtgggtacatttttttccctccttctccatatgtatgtgtatttgatgaattaaaataaataatttgaacctgcagggcatgggtataatatctgcagatggactcacaaaacagaaggtgatatgtccacaatacaaaatgctctcaggtaagcttgagaggttcaaggccatctggtccccaaagcaccacaaaggccaccaaaagggccccaaggttgacaatgttcacactgatctcagaactgcatatatagctgagtggttctccatgactcctggcccacggaaggggccaaaatggtgtgagcataagcggtttctggcacattactctggggccatgaggttcggggtaaagtgagccgcagcttttacatgttagtttcagtgggaatgtctgaaagaagagccttcaggaaaggggttttcatagtcaagtgctcctggtggtagagtgggcaatggggttgtttgcagagagtcacttttttttttttttgagacaggatctcactctgttccccagcaggagtgcagtggcacaatcatagctcacagcagccttgaactgccgggctcaagtcatcctcctccctcagcctccccagtaactgggactacaagtgggcgccaccatgcccagctaatttttgaaattttttgtagagctggagtctcactttgttgcccaggttggtcttcaactcctagcctcaagtgatcctctcacctcagcctcccaaagtgctggaattacaagtgtgagtcaccgcactcccctgggagcaaattttagctttcctggtctcccttgtgcaggatgtgaaagctgtgagataggctgtaagccccaggaagggtagctgcattccagagtctgcaggatttgggaacaggcgtggacatggctggccagacacacgtgggcaggtgtgtcagagtctgccccatggggaaagggccaatttaacatctcatttgtgactggttgcggtggctcacgcctgtaatctcaccactttgagagaccgggctggcagaccacttgagctcaggagttcaagactagccttggcaacatggcgaaatcctgtctctacaaaaaatacaaaaactagcctggcgtggtggtgcatgcccatagtcccagctactttggaggccgaggtgagaggatggcttgagctcaggaggtggaggttgcagtgagccaagatcatgctactgtactccagtctgggtgacagagccagaccctgtctcaaaccaaccaaccaacccatctggtgtttaccaagtgcatccaggtatggtcactgatggattctatggcaaggtccagtggcccctggggcctgtagcaagagctaggaggacctctgaataacagatgggcttatctgagactgtaggagctacaactggcacactcaaaagccagccgctggccagcactttgggaggctgaggtgggaggatcactcttgagcccaggagttcaaaaccagcctaggcaacatggtaaggggccgtctccaccaaacaaacaaacgacaaaacttgccaccatcattcctagctccttttccagcctacaaaagcaagaggacactagcacccaggcacacttcctccaagccagctgtcctcttccctcttacaactctcctcctgtggctcgggtcctacagcccagcccctcatctcaggaacactcttgccctactctccgttactcaaccttctgaagaatcattgctccaccttcttccctttcacctaaaagctactggacaagtcccttagtagaaaggagatgtctacaggccagcacgatggctcacgcctgtaatccctgcactttgggaagctgagcagggcagatcacctgaggtcaggagttcgagaccagccttgccaacatgatgaaaccccgtctctactaaaaatacaaaaattagctgggcgtggtggcgggtgcctgtaatcccagacacccaggggctgaggcaggagaatcgcttgaacctggtaggaggaggttgcaatgggccgagattgcaccactgcactccagcctgggtgacagagtgagattccatctcaaaaattgataaacaaataaaataaagaaagatgtctatagttgtcaacctgcagtgaatcctcagtactactgggaaattctaccatgtttcttttgtccactcacctttgtgcttccagacctttcccactcccctcactctttgctgcagtctaaggtaaacctaccaccaagcattttatttatggatttatgtattttgagacagagtctcgctctgtcacccaggctggagtgcagtggtgcaatcatggctcactgcaactttgaactccctgggctcaagtgatcctctcactccagcttcctaagtagctgggactacaggtgtatgccaatgtgcctagttaatttttgtattttttgtagagacagggtttcactatgttgcccaggctgatctcaaactcctaggctcaagcaatgagcccaccttggccttccaaagtgttgggattactactgtgagccaccaggcccgatcccaccaagcattttagatcccctccttcaagccttttcagaaccttcacaagaagaaccagatcatctctctcctatatcctcagccactttcaaccagatcttcctctttgaccttaaaacatgtttaagtctcttctaccttaaaaaagcaaccaccaaggccaggtgcagtggctcacacctgtaatcccagcactttgggaggccgaggcggtggatcacttgaggccacgaattcaaggccagcctggccagcatggtgaaaccccgtctctactaaaaatacacaaattagctgggcatggtggtgcgtgcctgtaattccagctactcgggaggctgagacaggagaattgcttaaaactgggagggaggccgggcacagtgtctcacacctgcaatctcagcactttgggaggccgaggcgggcggatcacgaggccaggagatcgagaccatcctggctaacatggtgaaacaccgtctctactaaaaatacaaaaaaaaattagccgggcgtggtggcgggcgcctgtagttccagctactcaggaggctgaggcaggagaatggtgtgaacccgggaggcggagcttgcagtgagccgagattgcgcctttggactccagcctgggtgacagagtgagattccgtccaaaaaaaaaattcaaccaccaagaaaggtatcccctcaatctacactgacatctccagcacatacctctcttctaagctccagatcctcatccccaagtgccttattggtgcctcttctttgatgccatgttcacactggaactcgggccattcttcccatcctccaccctcccaaatatggtcctcttccggggcttcccaaaacaatgagtgccagcactacaatggctcatcccagagacccaggagacattcatgattcctacctcttcctcaccctccatatccatttcaccactgattttacatcaattttattccaaaatctttctcaaatttgactttcttttttttttccatccccattgccactaccatagtccatgaatggttttcaaagggaggttcatgtaccccatagtatgggaaggcaatccattgggatactgggagaaaatattagaacttctacatttctttcttttttttttttttttttgagatggagtctcgctctgtcacccaggctggagtgcagtggcgcaatctcggctcactgcaagctctgcctcccgggttcacacagttctcctgcctcagcctccagagtagctgggaatacaggcgtccaccaccacgcccggctaattttttgttgtatttttagtagagacggggtttcaccatgttagccaggatggtctcgatctcctgacctcatgatccgcccacctcggcctcccaaagtgttgggattacaggcgtgaaccactgcacccggcctcttttttttttttttttgagatagattctcgcttcatcgccaaggctggaatacagtggcgtaatctcagctcactgcaacctctgcctcccaggttcaagttgttctcctgcttcggccttccaagtagctgggattataggcctccaccaccacgcctggctaactttttgtatttttagtacagatgggatttcaccatgttagccaggatggtctcgatctcctgacctcatgatccgcccacctcggcctcccaaagtgttgggattacaggcgtgaaccactgcacccggcctcttttttttttttttttgagatagattctcgcttcatcgccaaggctggaatacagtggcgtaatctcagctcactgcaacctctgcctcccaggttcaagttgttctcctgcttcgaccttccaagtagctgggattataggcctccaccaccacgcctggctaactttttgtatttttagtacagatgggatttcaccatgttggccaggctggtctggagctcctgacctcaggtgatcctcctgcctcagcctcccatagtgctgggattacaggcatgagccaccatgcctggcccgtctctatgtttttgactactctaggtaccttatgtaagtggaatcataggatatttgtctttgtgactggtttcttttggcataatatcttcaaagctcatctatttgcatcgtagctgggattataggcatgcgccaccacgcctggctgattttgtatttttagtagagacggggtttcatcatgttggtcaggctggtctcgaactcctgacctcaggtgatccacgcgccttggcctcccaaagtgctgggattacaggcgtaagccacggcgcccggcctccttcaacgctgagtaatattctattgttatgtttataccacattttgtgaacccattcacccgtggatggacattgggttgcttccaccttctgactaatatgaacatgggtgtacacatttatatccactcttgcctcccctccgtagtccttccttctccacactgcatctagagtaacccctttacactctcaagtatggacaaatcacctcttgcttaaaactcattagttttgcaacactgtcaagtaagacctaacttctcaccactctgatttattattggaacacaaaactgggccatgctccgtggctcaagcactttgggaggccgaggtgggcggaacacctgaggtcaggagtttgagaccagcgtggccaacatggggaaatcccgtctctactaataacacaaaaattagccgggcgtggtggcgcacgcttgtaatcgcagctatccgggaggctgaggcaggagaatcacttgaacccgggaggtggaggttgcagcgagccaagatcacgtcactgcactccagcctgggcgatagagcaagactccgtctcaaacaaacaaaacccacagaactggaagacccttgctgctgcttctgcgtaatgtgttctcctcccttctcgtttttttttttttttttctcccttctaccccttaggacctcagctcctgctctttccctgggggaattccggatcactctcctttactaggtcagggtactctctccctccctcttactctttcccctcctaccacttgtcaccattggtactatattatcacccggatatgtgacaatggtattgtgtatttaccactaaggaataaacttatgagggagagagcactacccgttcctgcagtgcccgtcggggcctggcatctaggaaacactccatacgccagtaatcgatttcagtcaatttcagtaataaatccaggaggacgcagcccgacccctcccgcccgggggccaagccatggtgggggatctgggtggacctccggctctggccgccagtcctcaacctccgccccggccgtcccgcttgggggcccagggtcccaggagaggaggctccggggcgccccctcccctctaatgcgagaggagagtccgctctaggcgcgggatccgcaacctccccgcgtccgcccgaggcgggggcggggccggaccggagacgtaacttccggtgtacacagccggtccaaggcggtgcgctgggggccggggcgcgtcgcaggtgaggagcgggcgcggcgggcgcaggcgggggctggcgggcggggtcgggcggtgggcggtgggcagcggggccgcgggccgcagccagggcagacggcgagacgggcccgcggggcgccgctccgctcggggccgcagggcgcggggccgtgggctcccgccccttgcccgcccgctgtggaggacgccgggctttgcgggcgctggccggccgacggaagcccggaggggcctcctggcgcgaacccgggacctgggggcgcgtcggagactcggcggccgcggcaccgcaggggcgggtcggcgcccgtcaggcggggaaaggggacgctccctcggttcgccggggcccgggaggtcgcgctggcgccaggacccgctcccggaagcccgcggagggagggcggcctgctggcggcaggggtccgctggggctagccggggaggcggccctcacgccatcccggggctgccgggcgggctgcgcgcaccttcccggcggcgccaggctgccgaggaacgcgcttttccggccctgcggagccagctggcgcattgggcccgaggggagggtccgcggggaccgggagggccggggctgagcgtggaggacccgagcccgagggacgagcgcagagtcaggggtgtgtctttctgcgccgcgcggtgcgaggaaagaagcgtgcctggttggcatgataagaattttgtttagactttttagaaattttccagagactcagctttgggggcctccagtttgaaaataccttgttctggtccctcatccccattataaaagcagttaattctcctttcctggcaaaacactcaagacgacacaaaaagtcttaaggtagaaaatgacagtcatctgccagtctaccattcagtgacaaccactgctaacattttggtgataatcaataaatacagataggtattgttatttttatggactttacagtatgtgatttaaccaccgatgagcattgagatagtttccaatttgtcacaagataaacaattctgccggaaggatttgtttgatatggtcttttttttttttttttaataagagactgttgcccaggctggtctcaaaacttctggcctcaagcgaccctcacgccttcgccttccaaagtgttgggattacaagtgtgagatattacacctggtctgattgttatcttagaataaatttacaaatggggtcaaaggtaactttatttgtttttttttgagacagtctccctctgtcacccaggctggagtgcagtggcgggatctagattaactgcaaccttagcctcccgggttcgagcgattctcctgctttagtctcccgagtagctgagattacaggcacccaccacgcccggctaatttttgtatttttagtagagacagggtttcgcccagttgaccaggttggtctcgaactcctgacctcaggtgatccgcctggctcggcgttccaaagtgctgggattataggcgtgagccaccgtgtccggccgtaacgttcaatttttaagaatacatagtatttgttttcctttgacatatttggacaatttttctgtctctttgtcataaaaaaaaattccagcctggcgcgatggctcatgcctgtaatcccagcactttgggaggccgaggcgggcggatcacttgaggtcaggagttctagaccagcctggccaacgtggtgaaacccggattcaactaaaaaaatacaaaaaaacacattagccaagcatggtggcgcgctcctgtagtcccagctacttgggaggctgaggcaggagaatcgcttgagcccaggaggcgaaggttgcagtgagccgaggtcgtgccactgcgctccagcctgggcaacagagtgagactccatctcaaaaaaaaaaaaaaagaaattcatgtttgcgtctcatcgtttcatggttttatttttttgcctttagtctacctaaaattcattcttggtttaaaatatgaaatattttgtaaatggctagtcagttccagatttattgaataatatgtaagctttatcattttatcatattttagactaaaagttctaagtgtatgtttgtaagggctacttacaaagttcatatttacattttgtgtgtgcttagatgttttcaagtgtctttaaaaatcacagtattttcttttcacagtatcttcacaatattttgttttaaaaagaaatcattttccaatacaagtacagggaatatttcatgtttgagattttttttttctttttaaagcaaaaagtttagtttattgccgtttcatttgctttcttgctgacaagataacaaactccatatgaagagttcaggtttgttgtggcaacttttcagtgtggcatttgagattctaatcttcctctatttttgcacacaaatacgtaggttggcattggagaccaagatagaaaagttctcagattcccttggcaagcctagatttttcaatctaaaattatctccagatgtttggaagaccatgttttaagcatccttttttttttttttaagcaaattgcacatgattctgtgaaaattttagtaaatgtttgttctgttgaaaacctatagcctaatacatcaggatccatgtgtcaagtgggtcttccaagtctataggaaataattgtttctgaaagctagcaggctgggatatcacatgggttgggtgtccactctctttttttttgagtcggagtctccctctgtccccgaggctggagtgcagtggcgcaatcttggcttactgcaacctccacctcccaggttcaagcaattcttctgcctcagcctccctaggagctgggatcacagttgtgagccaccacccctggctaatcactcttttttcctcctgtaactttgtccttagtgaaaaatgatgatcttcctaggtaggcaaaaaaatgttggtttagataaggaattgatttgttttggagttattgaaaagcaggttgccgttttctctgaagtgtaagttcacagagagcctgaatgttgtgtttggattaaggaaaaacagcaacaggttgtgcttgtgcttcaaatgtctttaactctactgaaactgccctcttgagggtcccctaactgatgcatgcagtggccattgcttaattattttccttgactttgatctcaggtatttggcatggtgagctattctttcttgctctcgtgaatctcccattgattggccttcttttttctttttcttttttttcttttttttttttttgagacagagtcttgctctgttgcccagactggagtgcagtggctcggtctcagctcactgcaacctctggctccagggttcaaacgagtctcctgcctcagcctcccgagtagctgggattacaggtctgcgccaccacccccagcaaatttttgtatttttaatagagatggggtttcaccatgttggccaggctggtcttgaactcctgacctcaaaagtgctgggattacaggcgtgagacaccacgcttggccttgattggccttcttgacttggaactagtgtggtcatttcctgaaatctgtgactgcactttctcatttgtctttactgcttctcttcatacatctaccttggggcattttctgaagcctagttttgtacctcttacccccgctccaaaacatattccttcccacttatccagtatatgagtcctgggtagagaaccacctcatttccttacctctgccaccacttagtgacccccgactcagagttttctgcaggtcaattctttttctcctgttcagtaacccctggacatgttcctgaggccatgctttctccaggtgaagaaaatatcacttctggccgggcgcagtggctcacgcctgtaatcccagcactttgggaggccgaggtgagcggatcacgaggtcaggagaccgagaccatcttggctaacatggtgaaaccccatctctactaaaaaaaaaatattaaaaaattagccggacatggcgatgggcgcctgtagtcccagctactcaggaggctgaggtaggagaatggtgtgaacctgggaggcggagcttgcagtgagctgagatcgtgccactgcactccagcctgggcgacagagtaagactccgtctcaaaaaaaaaaagaaaagaaaatatcacttctttgcgaggacaaggtgagaggattacatgctctcaggagttggagaccagcctgggcaacatagtgagacctctgtctcttaaaaaaatgaattttaggtctggcacaggggctcatgcctgtgatcccagaagtttgggaggccaaggtgggaggattgcttgagatcagcctaggcaacatagtgagactccaaaattatctaggtgtggtggtccatgcctataattccagctacttgggaggctgaggccggaggattgcttgagcctaggaggttaaggattcagtgaactgtgattgtgccactgcactccagcccaagcaacagagcgagaccctgtctcaaaataaataagtaaataaataaataaataaatatcacttatcaaggtgtcctgtccttcctgactcttaaggttcttaccagccggtgaatcacatcttccttcttgatatggattgtatttgccatttgctttctatccctacacctcgatttagactttgtaccttttcttaagggatttcaggcttaacgtggtcctactctggatgtgaaagaggagacccagtgaatttactcaagaattgagttagctcacatttatggagtacctacagtacagcccagttactttactggaagatcagaatacagagctggacagcacatcctgggaagaatgccaaataagcaattgtcataaagtattataagtgcctagaaggggagtcaccaagtaacctctcccaggtttcagagatcttgcgtgtcttatttactgctttgatctccagggcctagaacacagtgcgtggaaatgatgaagttttttttgtttgtttgtttgtttgttttgtatttcattcagtttaatgaggggacatgaggagccaggggcagaatgatatggttaggctgtgtcctcacccaaatctcatcttgaattgtagttcccataatccccacatgtggtgggaaggacctaatgggaggtaatttaatcatatgagcagtttcccccatgctatgcttgtgatagtgagcaacttctcacaagatctgatggctttataaggggcttcccccttcacttgggtctcattcttcttgctgctgccatgtgaagaaggacgtgtttgcttccccttctgccatgaatatgttttctgaggcctcccagccctggggaactgtgaatcaattaagcctctttcctttataaattacctagtcttgggcatttccccatagcagggtgagaacagactaataaaccttattttaagaaattgccacagccaccccaacctttagcacccacactctgatcaattagcagccatcaacatcacggcaagaccctctgccaacaaaaagtttaccacttgctgaagatgcagatgatcattagcattttttagtaatgaagtatttttaaattaaggtatgtgcattgtttttgtgacaatgcgattgcatacttaacagactacaatatagtgtaaatataacttttatatgtacaggaaaataaaaaacatcatgtgacttgcttcattgcgatattcactttcttgaaatgatctggaatgacacctgcaatatctccaagataagcctataatatcttttcctgataattttggctatatacttcttgatcaccttttctatgacaaggatttggtaatatcatttttttatttttattttattattatactttaagttttagggtacatgtgcacaatgtgcaggttagttacatatgtatacatgtgccatgctggtgtgctgcacccactaactcgtcgtttagcattaatgaagtatttgttgaaggaatgaatgatcatctgagaatgaaatcagaaaaaatgtcatacacattagctatctatagaaaagatataagtcaaaagatatttcgtaaatgtagtttgaagaatctcagggaaaactttaaattcaaccaaactgacccagctataaccccaggaaggcatgcatggaatgtgtttgtagctggaaagcttaaacttaattttgtatcctcagaagaaatacttgtgtttctgggagaggattgggacagtgtctggaaattggggtggcgggtccaagagaggaattacgtggtgtgtgtgtagcactctctgggggcctgaccagaggagcagtgcagcgttccctccacaaagccatctgcactaacacacagatgggcgtgtccctgttgttgcctctggctgcaagggtctctcccttgcttagcgtctgtcctcccagtaccatctgagtagaagatagctgcacgtggagatttcttggtaaggagagaatgtgagtggttgagggctctgcatctaagctgcttggatcagatcctggtcttgggatgctggctaatctttcagttttctgatttgtagaatggggataatagtagcacctttctcttagtgttgcagtgagggctctgagcgtgctacccggcacctgtgataagtattcaatgacagtattagctctcgttggtattcataaagtagtaactggcctctggttcatacatcagttttctttgagcttagatagcctaaataattaatccccatggaactgcttgcttctgggtgcattgaataagctgataaacagacactgggaagtaatgacagataagctcttcctacactgctcatccagggaatccagcctgcagttctcaggggagacttctggagaaggctgttcttgagctgagtactgtgggaaaaagtaagtccagtgccacagcaagaggggaggactcttgggcaggggcatgacacgtccaaaggtgtggaggtgagagcaagcatgaggtatttgagctgcaggagattgagggtagagtctggacaggtatgaataaggagtagagggaaatgacattggaaagtgggagcagtccttgaaataactaataacaatgtctaactgggcactaacagcacttcaggtcctgtgctgagtccttcgactcactgcgctaaccaggtttgatgctgagagctttgtctacattgcattgtttaatcctcacaacaaccctttgatgtaggtacttacctctggtatgtgtggcatcatgtcacatgtcacctggtaggtctccctgcctttttttttgaaatggaatcttgctctgtcaccctggctggaaggcagtggcaggatctcgacttactgcaacctctgcctccctgggttcaagcgattcttctgcctcagcctcccgagtagctaggactacaggtgagtgccaccatgcctggctaatttttgtatttgtaatagaggcggggtttcaccatattggccaggctggtcttgaactccttaccttgtgatccgcccaccttggtctcccaaagtgctgggattacaggagtgagccaccatgcccagctgctgcttttttttttttttttttttttttttttgaggcggagtctctctctcacccaggctggaatgcagtagtgcgatctcagctcattgcaacctccacctcctgggtcgaagcaattctcctgccttggcctcccaagtagctgggattacaggcatgcgtcaccacgcccagctaatttttgtatttttagtagagatggggtttcaccatattggctaggctggtctggaactcctgacctcaggtgatccgcctgccttggcctcccaaggtgctgggattgtaggcgtgagtcacctcgcctggcctctgcttcttgattcagcctgcacatggctgccaagataactcccagtgtcttatatatgtttaaaagctttttgtgatcctgtttcctgatgaagtccaagcacactaagatcctctgacttcatgaaaaaccacgaagttaaaatgtaaaaatatttatatcttagaatttaataaaaacaggacaggtgcagatgtggatcaagctcagagaaatcagtgaaagaagcaaggtacagaacaatgtatgtttgcccatttgtgtttttctaattttaaaaaatttctccacttttgaagtaatatgagctcatttgtttaaaaaaatatatataggccaggcatggtggctcacgcctgtaatcccagcactttgagaggctgaggcgggcggatcacctgaggtccagagtttgagaccagcctgacaacatggtgaaaccccacctctactaaaaatacaaaaattaactgggcatggtggcgggtgcctgtaatcccagctgtccaggaggctgcagcaggagaattgcttgaacctgggaggtggaggttgcagtgagccaagatcgtgccactgcactccagcctgggtgacagagcaagattccatctcaaaaaataaataaataaaaataaaataaataatgtctccctctctcgatagagagatagatagatagatagatagatagatagatagatatacatgaaataggtttataagtgcagaaataatttatggaatgatagaaaagaaacagtggttgtttttgggatgagaccccagaaaaccaggctgttaggctgagttagctttttctttgcataccattttgtatggtgtgaatttttttccctgtgtatatgtattttcttttttttctttttttttttttgagacagagtcttgctctgttgcctaggctggagtgaagtggtgcaatcttggctcactgcaacctccgcctcctgggttcaagcgattctcctgcctcagcctcctgagtagctgggattacaggtgcccgccactacgtctggctaatttttgtatttttaatagagacagggtttcaccatgttggccatgttggccaggttggtctcgaactcctgacctcaagtgatccatccacctcggcctcccaaagtgctgggattacaggcgcgagtcaccgcacccggtctatgttttcattttaacaataacttttaaaataaatgtctatgatggacatggctgttgtgtagagtgaatgtagcatggaggttaagagtgaggactgtgcaaggcggcttgggttcaaggcctgcccctgccttgacctcagtttacctcctctgaaaatggggaggtagtaatacctgcctcctggggttgtagtgaggcattactgagttaatatttgtaaagtccttggaacagttcccaggaggtatgtgtttgtcgtcgtctctgttgctctgtccctgtgctatgcatgaccgtaagtgtaaagatgtgtccagcctctgtctctgatgctcccagttcatttggaaagggagagcatgcagctaatgacagagacagcagaggctgcaggagtcagaaaggctccttgggaactgaggtggcccaagatggtttcatcaaaatgatggttgttaaatatgggtaatttctagagggaaaataacacaaagggactttttccatgttgtgtgtcccagccagcctgaggcaggcagaggagtcagaaacaggacaagagctttgaggaggcctgaaatttggacgtgtcatgtgatgacatgtctttttttttttggagggggggacggagtcttgctctgttgcccaggctagaatgcagtggcatgatctcagctcactgcaagctctgcctccccggttcacgccattctcctgcctcagcctcctgagtagctgggactacaggtgcccgccaccatgcctggctaattttttgtatttttagtagagacggggtttcactgtgttagccaggatggtcttgatctcctgaccttgtgatccgcccacctcggcctcccaaagtgctgggattataggtgtgagccaccacgcccggctggcatgtcattgttatatggcagagtttttcttggcatatatgagacaatgatatgatttgtaaatggtgacatctttgactcagtgaagtgtggttgctctgccttgatgtttggaatggctatgaggtgttctgtgtgacgtatttaacaatcctcgtaatgcagggcacgtgggaataaccagtgttgccagtgagtgttcttgacgcaggcctctacattaaccgtgagtctgttctaggattcgtgcctagatagaatattgcttttctttcttttttttaagtcattttgattatgttccttgtgtctgggccactgtcagttaagtgtgttttcaaattggcagtggcaaagaatcataatgggaagatttttgaaagtggaattagagcaagatattacctgaaaaaaaatctgattttcttactaaaaatgattttgggattaagtactagtgagatgctaattatggccaggaaacctggaaataactcgcatcttccctcaccccacccccggtccccgaggtggatatatgttcatgggaacagagtttggggaaagctggcttggctcccagacttgggtgccgcaggctctggtgacctaggcaggaagaggcggaagtggttcctctcaccagccacaaggacctgtgctgctcctgggtgtcaaggtgggagagaatgcgctacatccttgtgcttgagtcactttgtaatgtactttgtaattccaggtgatgcccctcctcaactgtgtcccttctgttcctgcctttggcttggggttgaaagaggagggagtggtgggcacggaaatgggaggagccatgacctctttcccctccagcgcatagggcattacttcttttagtttgttgcctggacttgggagttgggcccagagctgcaggaaggtaagttttatttctgaaagttgttttaacttacagattttgggggttcgagggagtttgttttcgactagtagaagacaagaattaagaattgcagtggaagatgaaatgctatcttcttactaatccacgccctctttcagagcagtagctttcatttacggagactgagggtatggcagaggctgtgctttatggatttaatcctcagcagtactgaggcacaagagttaggcgacttgctcaaagttagtaagtgccatttattcagctgatatttactaagagcaggaattcacatctagatcagtctgattcccatacccgtaccagtaactactgcattttggaagtgcgtcgtttccatgaagtttctttgtattggagcatctacctgaaaggcaagggcctgagcattttctccttttcccttattaacggtaagctccttgagagcaagcattatgtctgtctcttcaccactgcatcctgggttcctggagcagtgctatgcacttaggagaaccttagtgaatgtttgagtatgtgaaggctcatggcgcagataagtggcagagccagaagccagcctggaggtgaaccactgcgggcctgctctctggggctgtcttccctgcctagcgagtggatggtgaggaatcacctagaattttctcatttcttaatgtttgacctgatgaaatattgggaagaatgagcttcctggctgtgactctgattttctgttgttttttttgagacaggagtctcgctttgtcacccaggctgaagtgcagtggcgcaatctcggctcactgcaacctctatctccggggttcaagcgattcccctgcctcagcctcctgagtagctgggactgtaggcgcatgccaccatgcccagctaatgtttgtatttttagtagagatggggtttcaccatgttggccaggatggtcttgatctcttcacctcggcctcccaaagtgctggaattacaggtgtgagccattgcatcaggcaactttctggtctttttgagggatgggaaggtttgctgggtatgcaaaattggagtcagtgttctcagcttggaagagatgttataatttattgatagaattttttatggatgccttaaattctcagaaatgattttgaatcttaagtttatctaaaatttatataatccttctccatagtgagaaaaaaatttctaaattatagttcgatttacctatttatatataagcttctggataaatacttgtttttttttcctccatttgaggttaattttggataggttccatagtgcaaagttgttaagagtggcagtatagaatttttaagttttcttgggccagacatggtagtttatgcttgtaatcccagcactttgaagggccgaggcgggaggatcgcttgaggccaggagttcgagaccaacctgaacatcacagcgaaaccccatcttctgcagaaaaatttaaaaattacccaggcatggtggtgtgtgcctgtagttccagctacttgggaggctgaggtgggaagttgcctgagcccgggagatcaaggctgcagtgagccgcgatcacacaactgcagtactctagccttggcaacagagcaagagactgtaaggtctcactgcagcctcaatctccctggctgaaaccatcctcctacctcagcctcccaagtagctgggactacagatatatgccagcacactgggctaatttttttttgtttactttttagtagagtcgaagtcttgctatgttgcccaggctggtcttgagctcctgagctcaagcagtcctcctaccttggcctcccaaagtgctgggattacaggtatgagccaccgtgcccagccaagaccctgtctttaaaaaaataagtaaaaacaaaaacaaaaaatagaattttaagtcttcttaaataactttctaatggacacaattagttttcagtaatccaaccttttttttagaagttttgaaaacttttttttggatacctgggcttttgcacattgtaccacactgtaacaaaaataaaccgcaggtttctaactggtgtagactgttgatttttttttttaacaaattaggtttgaataaattatataattgctttgtggtttttttgtttttttttttttgatggagtctcgctctgttgcccaggctggagtgcagtggggtaatcttggctcactgcaacccctgcctcccaggttcaagcaattctcctgcctcagcctcctgagtagctgggattacaggcacctgccaccatacctggctaatttttgtatttttagtagagacggggtttcaccatgttggccaggctggtctcgaactcttgacctcgtgatccacccgccttggcctcccaaagtgctgggattagaggcgtgaaccactgcacgtggtgctttgtgtttttttttttttaaatctacttagaaataaattattttcaccccctgatttacacttgaatttccactagcaacacaatttgttgtcacaaatgttttcatagtacttgggcacatttgatgcagaaatttttaatggtccaagactattttagttgatagatgaaaccttccttttacctgaacaaactttttcggaagtttaggagccagctttgttcatcctttggtgataggtggtggtttgtatgtgtttgtagacaaaactttccttggcggggatttgccccttttttcgttgtttcttcttcctttgaagatctctgtttaacaaagattttttttttggctcacagtgttcctgtaatagaattccttcaagagttctaatactagttttgttttgttttgatggcagcaggttttgagagtgagcttttgacttcataagaagactaaaacaacagtcttagagtacagttaagtccatttgttaccagaaaatcagacagacagctaggtctgtcctcatcaggaccaagtaatactggatttttttttttcattaaatgttcactatttttctttgtatgaaattgaggccaggtatagtgactcacacctgtaatcccagcactttgggaggtcgaggtgggagggttgcttgagtccaggagtttgagactggcctgggcaacacagtgagactccgtctcttaaaagaagaaagaaaaaagaaattgaatatgtggtgattactacccgtttcatttacttttttacttattaacgtagtgactgtttaaaaaaagttacgcattgatcttcctgttccttccccaccaaaaataaaagcaaaaacaacaagccacccctcaaatgaaacaaaattaagcctgttctttatctatattactacttagcacatttgacctatttttttaaaacctctgttattttgaaagtaaattttggctctgttgaccttgcggttagaaaagttgttcttctgcttaaatgaaatgatcagttgtttgtagattaccaaatataaaagctcttcagaaccgctaatgataagttgctttggcttcatagaggaacgccatggtttgtggtggtaaattgttacagagcaaatgtcagtaccagaggcggtcatggatcaccacgtggaagcaggttgttcccacatgagattggtagcgagccggtgctgcatctgtctcctttcccactgcatcctgggtgcctggagcctcacagggttgacccgtgttgggggtggggatggttgtagaagcctctttatttttacttgtgatagattctggcactgattagaatgtttattcagtagtttttttcctatccgcctgagttttcatagctcagtataggataacatgggcttcggattttgtcaaccaatcaattatatagtagctcttttgttttgtttttaaaatttatttctatttatgtatttatttatttattttgagagaggcccttgctgtgttacccaggctggagtgcagtggcatgatcatagctcactgcaaccatgaacacctgggcccaagtgatcctcctgccttggccgtctgaagtgttaggattacagtgtgagccaccagacctgacctttgttttgttttagtagctacctcttgactagaaaaatagtttaatcttggcctccttaaaaccttttcattgatattttttactctgctagaacagttcagtttttgcatgtcttcaagtgaacatgctttagtattaattccatggaagccatttctgtagaataggctagtgtccagttttgtccagttttccttttggagcagtgtctcaggcacagaaatagtctgggcttggtggaccccaccccaaagtgtcacttcttttcctctggccttgctctccatgcccgcctttctcttctgatgttttaatgataccctccctgctcggtgatttgtgttcaggaagctaggcagtgattacttttgtttctgctttgtgaacttcctcccccacttcctatttttaccgcagttgcacaggaaatgaggcggctcctggctggctgctgctaagcagtgattttaggtggcagaggacaaggcctcagggcctgagccatttaaggcattttccaccttaatcttttcactaccttcttcctctaggagtcataggaacatgattttgtgattgggttgaggtgacatcatgtcctcagccttgtgggtggagacaggggttgctgtttagttggaggacagcacttttgtgaaggaagtgagggcttttttcagcagtaacaatgtgggtggaatgtcgtggccctgtggcctctgcagcttgagggaaggttaagttgaagggacaggccctgttgcaggtaaggatagggaggtggattctggttactctctagagggccttgactggcagcttgaagtgagctgaggagcctagtctgctctctcagatctttgaggggggcctcagcctctatggcaccctccttcctctgaacccatggcatttgttttctaaacgacttatttagcatttatcagtctcttttttgatgatgcctcttcttagcttatggacccgttatagcttaatttatggagaaagtttgtatcatctccccagaaagaagtaacttgttatacattagttaacttgaatatggaaggtgctcaaagcattagtttatcggagattcttaagagctgcactgttgacattttggggtagataattctttgtaggggctgtcttgtgcattatgggatgttcagcagcacttctggcctctacccactggatgctacccactagcacttgcccagggtgacaaccaaaacatctctagacattgccagatgttggtagggcagagaaggacacaaaattatacttttccccacttgttgagaaccactgtgttaaagaattgaattactaattactaacttataaaatggaataaagtagaatgtttggttccctgggattaaagccatttgttagtttctattttcatatctgacattctcataattcttagtttgctacttagagtatgctgtgctctatcagcttcagctagtgttcaggtataccttctgtgcactttcttttttttttttttttttttttagatgaagtctcactctgttgcccaggctagagtgctgtggcgtgatcttggctcactgcaacctctgtctcccgggttcaagcgattctcctgtctcagcctccctagtagctgggactacaggtgtgtgccaccacacccaactaactttttgtatttttagtagagacagggtttcaccatgttggccaggctggtctcgatctcctgacctcgtcatccacccgcctcggccttccagagtgctgggattacaggtgtgagccaccacgcccggccccttctgtgcactttcattgaaagaactaggagctgggcgcggtggctcatgtctgtagtaccagcattttgggagccgaggcagaaggattgcttgagcccaggagtttgagaccagcctgggcaatgtagagagaccccatctctacaaaaaatcaaaaaataaaaattagctgagctacttaggaggctgaggtgggaggttcacttgagggaggtcaaagctgcagtgagctatgatcgtgccactgtgctctagcctggggcatggagcaagtctcaaaaacaaaaacaaaaacaaaaacaaaaaaactagggcctgagcctttggcaggctggcttcttgtcctcatagaaggcattctgtcagcttctgtgccttgatattgcttgctctggaagtcaatttccttggaagctgagtagtgcaagggtaaggaggaaatgagaaacatttaggatataataataataggtaacatttatggagcagttgctgtagaagaggcactgtggtgaacaggattgacaggattgaaaggacaggctagacaacaggacggggaccatctggaataacaccttaagtttgggttaaaagttggttgtgcctttgaccaagcaaggcagtaaatatagcaggaggagtgggaaatagaaaggtgacagggtaaaactttttttgaaacatagtcttgctctgttgcccaggctggagtgcagtgatgcaatcttggctcactgcaacatctgcctcctgggttcaagtgattcccagatagctgggatcacaggcgcccaccaccatgcccggctaatttttgtatttttagtagagacagggttttgccatgttggtcaggctggtctcaaactcctgacctcaggtaatccacccaccttggcctcccaaagtgctgggattacaggcgtgagctaccgtgccctggccatgaaagggtaaaacttgaagaccctgcagagatgtctcctgggtctggtccttggagagggaggtcttgactggagagttgaatttgggaatcatcagcagtgatacggagtatgatctcctagagagaggtcacttttcattgctccagctcagcttctcatcagttccaagaagctggaagccttaaccatcttctaggagtggtaagcagagtgccatggtctggatatttgacagaggtgggatggtgcaagaatggagagctcaacctgtggcagcagattgccatgtcccagacctagctgtgtggtgaccactaccttagccatgtggtgagaacatgaagaactcacttcatcttattagatgcctcacctaccttatggggtcattgtgataaccttgtaatttgataacacggccaggtgtgatggcttacgcctgtaatcccagcactttgggaggccaaggaggttggatcacttgaggtcaggagttcgagaccagtctggctaacatggtgaaaactgtctcgactaaaaacacaaaaattagccaggtgtgtgacgcacacctgtactcccagctacttgggaggctgaggctggtcaatcacttgaacccaggagatggagattgcagtgagccgagattgtgccactgtactccagcctgggcttaacagagcaagatcctgtcttgaaaataaataaataaatatgataacatgtgaagtgcatagcacagtgcctggctcttacccacagttaatgtcagctgtttcaagatatttgatatctaaagctccaagtataatgcttggcacgtcatagacacttagtgactggtccatttctttggggagtacttatgtggacgtggcatgtcttcactagcttatttatttattttaagcagaaccttatttctagcatctaactactgcctccgtggttggcaagggtgacttcatgaatgttgtaaaggaataccattaaataagtactgaggacaaactaataattcaacaaatatttgttaaatgtttacatcatgcttagcacccttggatgttttgaatgagctcaggggtcctgggggttggaggtgacagggaaacacagagcaaaccggcagttgtgatctagcatgttatgcttcagtagagttaatgttaaggtggggctaaaaacagggtgttacggcagcagaggaacccctcgctcagtctgtcaaagtggtttctcagaagaagtgatgcctaagttagacatccaagaggaatgagagtgagccaagagagctttccagacagtagaaatgaaatgtgtggccaggtggcgagaaggaagatggcacatgtaggaagtgggtggtgttggggcggtgtaagaaaattgggaagggtaatggagagccatagtggattttaagcgcagagtggtgtgatcacattgattctagagtagtcacacagcatccagaggggagtagcccaggcatttggaagatcactcaggaggcgcctccataattcaggcaggaggtaaaaacagtagctttggtacggcagtgaagatagaaggaaaaggacttgagagatactaagaaggcaggaaggggccgggcatggtggctcatacctgtaatcccagcattttgggaggccgcggcgggtggatcacctgaggttgggagttcgagatcagcctgaccaatatggagaaaccccgtctgtactaaaaatacaaaattagccgggtgttgtggtgtatgcctgtaatcccagctactcaggaggctgaggcaggagaatcgcttgaacccaggaggcggaggttgcagtgagcttagatcgcaccattgcactccagtctgggcaactagagcgaaactccgtctcaagaaggcaggaaggataagactgtgattaattggatgtgaaggagagtgaagagtagaggataactcccaggtttctgccttgttcaagtaggcagatggtgatgtcatttgccaagactgggaaggcatattgaaagacttggaagatttggttttggacttttgattttgggacctgtccactaggcagttgaatatttgggttctggagcacaggacaaagatctgggctagagggatggatttgggaatcttcccagaaggaatatgttgctcttagaaacagagagggcatagcacttaaggtctatcagaggaggagtagctcaaaggggcaactaagaatggccagagaggtatgaggagagccagcactaagcgtcttttcgtgttagcagcttacagagttgcttcactttgtaatgtggtaacagatagagggagctaaaaaagtagagttctaaggaacgtccgagcaaagcactgaattttccaggcattttctcttgcctggatagatattttaaatttatgaatgttgagaataaaattcttcaaagcatttttctagagtgcatttctaaatacggtttgagtcagtctgaactgactaaaaacatggaaatggttgggctttgaacttcatagacaataacttcactaatctgcctaaagaatttcctgtagtgtctccacattatcaagggtagatatttggatttgcatttttgtggattggagaggacagaacattttctgtgtttttttttttttcctcagaagagggaattgtttaggaatgattcatctttatattttttgtaacagctttattgaaatataattcacataccatacagtttatccatttaaagtatataaattggtggtttttagtatgttcatagttatgcaaccatcatcaattttagaatattttcatcactctgcaaataaaccatatacccattagcagtcatcccttatttcccccattccacacccccacccccagccttaggcaaccattaattgactttttgtttcaatggatttacgtaattggtacagttcatattaagggaactttgggtctggtttctttcacttagcataatgttttcaaggttcatccatgtatcagtactttattccttttcatggctgaataatattccattgtacagttatactacattttgtttgtccatttgtcaattgatagacatttgagttgtttccagtttttggtattatgataatactgctccaaacgttcatctgcatgttggtttgtagacatgtttttcatttctcttggatatatatacctaggagtaaaatttcttggttgtgtggtaattttatgtttaaccatttgaggaactgccactgtgttttccaacatgtctgtaccattttgtattaccctgagcagtatatgaggattccaaattctctaacattttgtcaacacttgttattgtctgtttgattatagtaatcctagtggttgcgaagaggtatctcattgtgattttgatttgcatttccctgatagttagtgatgttgactgtcttttcatatgcttattggcatatcatctttggagggttcatctatatttgtgttttgtttgtttttttttctttagagatggagtcttgctctgtcttccagactggtgtgcagtggtgccatcttggctcactgcagcctatgtttcctaggttcaagcagttctcctgcctcagcttcctgagtagctgggattacaggtgtgcgccaccacgcccagctaattttttatttttggtagagatggggtttcgccatgttgaccaggctggtctcatgctcctgacctcaggtgatctgcctgcctcggcctcccaaagtgctgggattacaggggtgagcacctgtgcccagcccatccatatttgatcatcagttttggcaaggtaaattaagttgcaaaacctgaaactttaaaggaacaaacataacacatttgattgtagaaatgagggaaaaagagtgtgtgtgggtatgtgtgtttatgtacatatgtgtatatgtacagtggaagatgccataaacagatttgtaaaagttaaaggacaggctccccagagaaatagccagtgtgctccatccacatcaagcctgagtgtgagagagttctggataatcctgttacctggctgtgactttggaagtggagaccatgatctctgccttctccctcatatcatctgtcttaaggtcacagataccgcagccactgccaggtttccacaagccagtcacctttcaggtggagaagtagcttgctatagcagccagtttctcgagtttgcgcgacagtgccactggaacaatggctcattcatgtcagatttccagagagttgggcagcacacttgtgagaatccagctgtgaacaagccattgctgtctttaggagcttatgtgccaggtggtaaagtgtacatatgcaaataaaatggtaagatgattgcaagttgtcatgaagataagacagcattgtaggggtgaggtgaccctagattagacaggttggctgcagaaggcttctctgagggtgtaacacttgttttgagagctaaaggatgaacgggaggagcatcatgagtaggagggaggcaggagctttctggatagaggcagcagcgtgtgtaaagagcttggggcactagaagaactggaagataaatggtgtgactgcagaatgatgagtgagactcaggaggcacgacatgaggctggagaggtgggcagggctgtgcaggtctcagtaaggagtttgattttattcaaagtgccagggaccattggatataaattcttcataaactgcatgcagaagagagattaaaaggttggcagaaaggaataaaaatgaaactggaggaccaagctggtaaaaattgcccccaagggtctatcagaatcctaactcacttagaccaataagatcagtggttacttatgaacaatacgtttgaaaagacctatgaaaaaacacgtgaaatttggagtttctctgtctctcatgtttcctgtaagtaattcgctagatatagagactcgattagattttgattcagtattttaggcaaaaatattttttgggtggtactgtgtacttcctattttgtcacaatgataggcatataattatatgtttagttccccactttaatgatgctaaaattaattagtgagttcaggtgttatgcctgattccttcatcataaacttctccatcaagtttcaccaaatcattttaacagtgattaataatcattggctagatacactatttcattagagttgcaaaataatagttttcctagcatttcttctttatttattggctaattttctttgattaagcactttcctaaatggagtattcaaaaaaaaactatataaacaggaaaagcaggataaatgcttgatttcaccccccccccccacccccagcagttttcagaacaatagcttggtgccttaacacctccacagagagatgaccaatggaatttttcttaatatcattattgactcactttttttattgtggtagaatatgcataacacaaaatttacagttttaaccatttttattatacatttcagtggcataagtacattaacaatgttgtgcagccatcaccaccatccatctccagaactttttcaacatcccaaactgaaagtcttggccaggcatggtggctcatgcctgtaaacccagcactttgggaggctgaagcgggtggatcacctgaggtcagaagtttgagaccagcctggccaacatggtgaaaccctgtctctgctaaaaatacaaaaattagccagatgtggtggcataagcctgcagtcccagctacttgggaggctgaggcacgagaattgcttgaacccaggaggcagaggttacagtaaaccgaaattgtgccactagtactccagcctgggtgacagagcaagactccatctcaaaaaaaaaaaaaaaaaaaaaaagtcttgcctattaaacagtaactccccattttccccttctctcagctcctgggcacaacctctcttctactttttgtccctaaaaatttgactattttaggcaccccatatatatggaatcacacagtatttgtcctttagtgtctggcatcttagcagagtatctccaaggttcatccatgttggagcatgttattagaatttccttcattaattttttttttttattgacagggtctctgtcacccaggctggagtgcagtggtgcagtcaagcttactgcagcctcagatgcctgggttcaagtgatcctcatgcctcagcctcccaagtagctggaactacaagtgtgcaccataatgccaagctaatttttaaattttttgtagagacagggtctcgccatgttgcccaggctagtctcaaactggcctcaagcgatcttcctacctcagcctcccaaagtgctaggattacaggcatgagccactgcttccagcctttcttcctttttaatactaaataatagtccattgtatggatataccacatttgtttatctattcatcttccatggacatttgaattgtttccaccttttgactattatgaataatgcttcggtgaacatgggtgaagaaatacctgctcacgtccttgctttcagttcttttgggtagatgcacagaagtggatttcctgaatcacatggtaattctatgtttaattttttaaggaagcaccatactgttttccacagtggctgcactattttatattcccactagcaatacacaaggcttccaatttctccatgtccttgccagcactttttgttttgttttgtttttgagacagtgtctcgctctccgtcccaggctggagttcagtggcccattgcgatctcggctcactgcaacctgtgcttcccgggctcaggtgatcctcccacctcagcctcccaagtagctgggaccacgcctggctatttttttttttatttttagtagagacgaggtttctccatgttgcccaggctggcagtggccagcacttattttctgtgttttgtttattttaatattagccatcctaatagggtatgaagtggtatctcactgtggttttgatttgcattttccaagttatattattccctagttgtactgtctgttcttgccttactgtaaagaaatacttgagactgggtaatttataaacaaaagtggtttaattggccgggcgcggtggctcacgcctgtaatcccagcactttgggaggccgaggcgggcggatcacgaggtcaggagattgagaccatcccggctaaaacggtgaaaccccgtctctactaaaaatacaaaaaattagccgggcgtagtggcgggcgcctgtagtcccagctacttgggaggctgaggcaggagaatggcgtgaacccgggaggcggagcttgcagtgagccgagatcccgccactgcactccagcctgggcgacagagcgagactccgtctcaaaaaaaaaaaaaaaaaaaaaaagtggtttaattggctgtacaggaagtatggcagcatctgctcctggggaggccttagggagcttttattggtggcagaaggcaaagcggagcaggcatcttaaatggcaggagccaggaccgagagagagaagggaggtgctgcccacttttaaacaaccaggtctcatgagaacccactcactattgagtacaaaggggaaaatccaccacatgatccagtcacctcctcccaggctccacctccaacattgggaattactattcaacatgagatttgtgtggggacacagatttaagctatatcactagtgattagtgatgttgagcatcttttcatgtgcttattagctgttcgcatatttcttggggcaaaagtctattcaagtcctttgcccatttaaaaattggatttttgtgtttgagttgtaggagttctttatatattctggatattaattccttttcccatatgtgatttataaatattttcatctatggattgctttttgcttgtaatgtcctttgatgcctaaaagttttgattttgaagtccagtttatctgttttttgttgcctgtgcttttcgtgtcctatccaagaaattattgctaagtctgaactcagtaatttttatatatttaatgattttcacccctaaatggttattctttttgatgcttaagttgtcccattattgatcgttaatggcacttatttttcgggttttctaggtgcttttgacatgagcctagtagtgttatatgagttccctgctttctggctttacaagaagtccggggcttatcggaaaaatttctgatcccagatccagaatcagccatttctttaactagttctgattctttttggtgggaaatggtattaagggcattcattacaattaagatgtaaattccagtaggtttttttttttttttagtagaactaggaaatacatactttttggaaagaaaaagatacaccatgatttcagactgatttacttccaattcaaatgaaggattaaaggatttttatatctttgattttatatttgtcttttctcatttgttgacagtaacaccagaggggtccagtcaaaacacgattttattgattgaccgattgatggagaccacctcactctgtcgcccaggctggagtatagtggcgccatgttggctcactgcagcctccaccacctgggctcaagtgatccttccacctcagcctcatcagtagctgggactacagggatgcactaccatgtctggataattttgtttgtttgtttgttttgagatggagtctcactctgtcacccaggctggagtgcagtggtgtgatctcagctcactgcaacctctgcctcccgggttcaagtgattttcctgcctcagcctccctggtagctgggactacagacgcctgccactatgcctggctaatttttgtatttttagtagagacgtggtttcaccatattggccaggctggtctcaaacccctgaccttgtgatctgcctgcctctgcctcccaaagtgctaggattacagtcatgagccactgcacctggccaattttgtttgtgtgttatagagatggggtctcactgtgttgcccaggctggtcttgaactctaaagcattcctcctgctttggcctcccaaagtgatgggattacagatgtgaagcactacacctggccgaaacacaattttaaacttgaaataattcttctctgtgtggctgtgccactaatttggtaaataatatagattcatttgtcttttgtttcatttttagggatatttttcttttttatatttgctttttgcttatatatttacgtagttctaaagataaaaccataagtaagatagattgaaagaagtctggctttcctccttgtctttgttcttctctatacgttgtaggtaaacatctttgttggtttttggtttattctcccatggcttattttaaaagctacaagcgtgtgtgtctgtgtgtttctgtattccctataccttacttcattcccattttatttcttctcgtttttatcttggcaatcatatttcttatttccaagaattcattgttgatttctacttcctttatgatttgtttgcttttggtttttttttctccccccgagatggagtcttgctctgttgcctagagctggaatgcaatagtgcgatctcggctcactgcaacctccgcctcctgggttcaagcaattctcctgccttggcctcctgagtagctgggattacaggcgcacgccaccacaccaggctaatttttgtatttttagtagagacggggtttcaccatgctggccaggctggtcttgaactcctgaccttgtgatctgcctgccttggcctcccaaagtgctcggattacaggcgtgagccaccgtgcccagccctgcttttaaggatgcactatctttccaacactgtctgaggaataccagtcagaatttcttttcaggtgttttttctgggacctaaaatatgtatttcttctgaggtctgatcaccttttcatcttagttgtccttttttgtccttttggttttccttcactgtctggtgatccttatcaatgaagaactgggttgttcatataggtaatttgcaggaggtccctctgtttttcaatagtcctcttgccttagtgagagttggctgattgaggaatgggaagtacagatgaaatcaggttgattaactggtttcccactcctgatttctctacctgctgattcaaagctgggcatttatccagctcctccaggaaaaagggctctgcctctctgttctcttttggccctgcatgttgtaaaaagtggccagctttgctctggtctgtcttgtaatatagtttcctctgctttctctccatcctctagaagatggcctgcagttaaatagactgtggccctcagaccttctcattactgttttgctgagattcccttgtgaatgtctttattgttatgtcactgggatttggggaggatggagaggtaagtgcacttgcctgtttagcctgtcgttttgaaatgaaactccttttgtcatcccatttctgacagtaggactgcttgccactctcttttctctgttggtttaaggactgaagtggatctaaaattattctctgtattcacaaatcatagctatcaatctttagtcagatgggaaaacttaattaattaattcagggactaaatttctctttatagctgcatagtccatgtaagtagaagttagttatcaatgaagtgtgtgatgcttcctgccctgcgattggtagatttctatttggttcaaggattgggtaacttttcaagacctttcctgtttgtcagtgacttttttccagagaagcagaaataacaaggcctgcttcctttgcttgctttgtgggaatgataatatcatcatcatcaaacatttagtgcttaatatgtgccagacatcattctaagtgctttatatgtataaacccatttaactcaataacagtggttactattatccttattttatagatgatgagacaggcagagagaggttaaggaacttgctcaaggtcaagctgatcctgacagccaagatctcaccctattagtcagacgcccagggccattctcttcttcacttcaatcgtcttatctttctaaagggaagtgcttcaagagattttcttaggatggctgaccacttttcatgtcttgtcaaccataggtataagaaaatcctctaatactgagtcttcatctagtttctttctttctttctttttttttttttttttttgagacggagtctcactctgtcacccaggctggagtgcagtggcatgatctcggctcactgcaagctccgcctcccaggttcatgccattctcctgcctcagcctcccaagtagctgggactacaggcgcccgccaccatacctggctaactttttgtattttagtagagacggggtttcaccgtgttagccaggatggtctggatctcctgacctcgtgatccgcccgcctcagcctcccaaagtgctggaagtgctgggattacaggcccggctttctttttttttttttttttttttttgagacagtctcactcagtcacccaggctagagtgcggtggtgcaatctcggcttactgcaacctccacctcccaagcgattctcctgcctcagcctcccaagtagctgaaattaccggcatgtgctaccacgctcggctaatttttgtatttttagtagagacagggtttcactgtgttggccagactggtctcaaactcctggcctcaagtgatctgcccgtctcagcctcccaaagtactgggattacaggcatgagccaccatgtctggccttcgtgtagtttcaagcatgtcctttattgcctgaaatagaaatcgctgatgactctaattgtagaaatgaatattttaaatgatataattatggctgaattcagttttaatctgtggagaacttttgcaaattatgttgaaaagatgttacttaaaatgttcttttctgctatgtatttgattttttaagtagcattaaaacttaagagtacatgacaaatctcacaagtcttggctacactaacttctgaggtctttcacaatgcgtatttatttccatgcagcatgaatagtggattcataaatggtgaatgttttcccagtgaaaattctttttaagaaaatacggaaaagaaatgtccttaaatggtttgaacatattttagcctgacaggcagataaatatgagggtggagaagcatgtgaaaaacatttagacagcattaagaagaattttattaaaataatgataataataataattagctgggcacggtggcatatgcctgtagtcccagctactggggaggctgcagtaggaggatcatctgagcccaggaggcagaggttacagtgagccgagatcacgccactgcactccagcctgggtgacagagccagacccagtctcaataaataaataaaaacagaaataaaataataaaatccaggtgttcgtgtgtgtgtgtgtgtctgtgtgtgcattttcaacattttgtttcagaaatgttcaatcatatacaacattggagcaagtgatatgatgcacctcatgtacccatcacctaacttccaacagtattttgtcaggggatattatgatcactgccatgaagacaaatgcttaggtaggtattaccaccttctctgtacattgtttcttggcaaaatgtcatttgaaaatgatagaactcgggcaggcatgatggctcatggctgtaatcccaacactttgggaggctgaggcaggcggatcactttgaggtcaggagtttgagaccagcctggccaacgtggtgacaccctgtctctactaagaatacaaaaattaatcaggcgtggtatcgggcacctgtaatgccagctactcaggaggctgaggcatgagaattgcctgaacccaggaggtagaggttgcagtgagccgagatcgcaccactgcactccagcctgggcaacagagtgagacttcatctcaaaaaaagaaaaaagaaaatgatagatcttgaatgtatttcagttccatgaccttttttttttgtttgtttcatcgtgttagctaggatggtctcgatctcttgacctcgtgatccagctgcctcggcctcccaaagtgctgggattataggcgtgagccactgtgaccagccagttccatgacattttaaaaaaattcaacactatctagttttgattacaacaaagatctgcacaggaacaccagatctgttaagaattagcgaaaactagtttacatgttttgaatgttttttctctctgcttgggtaggaaccccaggcgtgactgtgatacttgagcagtcttgttagaagcaattatgttacaaacagaacttttcattgatctgtgtaaccagccccttggttctcagaaaaagagttgtggccaggcacagtggcacacgcctgtaatcccagcactctggaaagccgagacaggtggattgcttgagcttaacagccagagactggtgaaaccctgtttcaaaacaaacaaacaaacaaaacaaaacaaaaaaacttatttatcactttggaagggaggtgcctttctgtattattattattttttgagacggagtctcgctctgttgcccaggctggagtgcagtggcatgatttcggctcactgcaagctctgcctcccgggttcatgccattctcctgcctcagtctcccgagtagctgggactacaggtgcatcccaccacacctggctaattttttgtatttttagtagagacagggtttcaccgtgttagccaggatggtctcgatctcctgacctcttgatctgtccactttggcctcccaaagtgctgggattacaggtgtgagccaccgtgcccagccaacctttctgtattctttttttttttttttgagacggagtctggctctgtcgcccaggctggagtgcagtggcaccgggatcacgccattctcctgcctcagccttcccagtagctgggactacaggcgcccgctaccacgccgggctaatgttctgtatttttagtagggatggggtttcatcgtgttagccaggatggtctcgatctcctgacctcgtgatccgcccgcctcggcctcccaaagtgctgggattacaggcgtgagccaccatgtccggcctttgtgtattcttgaatacacaggaatattggtgagaatccctgagttgcactacagtcggcatcatcaggcgtcctcattcttgtggctgtcagcagattttcagtggacccccagtttggctctcaaattatagcatacatcagaatcatctggggaacttgttaaaaaagtgtattctccaaaaaattagtcgggcatggtggcgggcgcctgtagtcccagctactcaggaggctgaggcaggagaatggcgtgaacccagggggcggagcttgcagtgagccgagattgcgccactgcactccagcctgggagacagagcaagactgtctcaaaaaaaaaaaaaaaaaaagtgtattctctgcttctctcccaaagattgattcgttagatttggattgcatcccagtaatcagtatttaaatagtcattccaggaagggtgctatcctgattctagtatcagagaaggaagtccttaaaagccattgttggttttcactggctgctactaggtttttttgttgttgtttgtttagagacaagatctcactattttgcccagactggactcgaagtcctggactcaagtgaccctcctgctttggcctcccaaagtgctgggactgcagatgggcaccactgtgtccagccctcatcctagttttactaaggttggtaggtggtgaaaaaaattgctaaaaatgttttcatcctttaacatgctcagtgagtgttatgacaaccccacatagacttttactgcctacagacagatttactgtcacagaggttgtcttagttcaggctgctttgacaaagtactatagactgggtagcttataaacaacagaagcttatttctcacagttccaaagtctggaggtttaagatcagggtgccagcactgtcaggttctcatgagaaccctctttcgggatgcagactgctgacttaccatgttctcatatggcagaaagagagtgaactggcctctttttataagggcactaatctcatttatgatggctgcaccctcatgacctaaataccttccaaaggccctacctccagataccatcacaatgggaattagatttcaacatatgcatttttggggaaacattcagtccgtaacacaggtgcacccttagttgtgggcaattcagttctgatgctgtggtctgatgaccacaccctgacaacataggtgcatagtgggtagtatgattgcaaaggatctcgtgtttttctctgtggttccactaaattctttagtccaagccttaggcctcccctgcttggtcacctgttggaccaacactaggtacaggaagtgcaggaagctcagtttacaaaaagtcatctggtgcttccagctgtatgtagcttcctctgaaagaaaaggaagcgtggggagtgtagaaagcagttagttcttcacctgaggctgcagttccaaaactgaatggaaactgtggtgtttgggaagtgtgtttgactaaagtttcctttcctcaatttctcaaaggaaactgtgactcttcccccaccatcttccaccccttcagtttccatacatacaagaaagaatgatgtcctggagcaacctctggagaacaactgtggggcctccccattacaaaacagcctcccctgtgtgcaatcagaattgctttcgtctgggcagaaccatacaacacacagctgggctgtgtggagagctgtggccgactgtagggcttgcccgctagtctgtattttcccctacatttctctacctctcatatagtggaattggtaccacgcaaccacctctggcctttgatggtggcctttgacatgcaaccacctcaaagccaaagggctttgaagggaggtgatgtgtgtcactttcagtgggaagtattaaagagtgggtatgagttttgactttctttttctgtgctagggcaaccatgggagacataagttctagtagtgtccctgtaagctgaagaagggctgctagacccacagtgaatttttgtgaacaagaagtaatctgggctgggcgccttggctcatgcctgtaatcccagcactttgggaggccgaggcagtcggatcagttgaggccaggagttcgagaccagcctagccaacatggtgaaaccctgtttctaccaaaaatacaaaaattggctgggcatggtggtgtgtgcctgtgatctcccagctactcaggaggctgaggtaggagaattgcttgaacccaggaggtgaaggttgcagtgagccaagattgcaccactgcactccagcctgggcaacagagcaagactccgtctcaaaaacaaaaagtaaatctggttgggcatggcggctcacgcctataatcccagcactttgggaggctgaggcaggaatcagttgaggtcaggagtttgagaccagcctgcgcaacatggtgaaaccctatctctaccaaaaatacaaaaattagctgggcttggtgatgcatgcctgtagttccagctactgtggaggctgaggcaagagaatcacttgagctcaggagctcaagaccaggtaggttgcagtgagccaggatctcacctctgcactccagcctgagtgacagagcaagattccatctccaaggccaggcatggtggctcatgcctgtaatcccagcactttgggaggccgaggtgggcggatcacaaggtcagaagatcgagaccatctggccaacatggtgaaatcccgtctccactaaatatacaaaaattagctgggtgtggtggcgcgtgtctgttatcccagctactcaggaggctgaggcaggagaatcgcttgaacccaggaggcagaggttgcagtgcgccaagatcatgccactgcactccagcctggtgacagagctagactctgtctcaaaaaaaaaaataaaaaaaagtaaatattaggttaagccatttatttcaggatttgttactgcagcatagcttgatctgtctgccagtttgaagttctgagagtcaagatacctgagtttgattctgagactacatgtggtctagtgcaagacctttaatgtcctgaatcccctttttaatatataaattgaagggtttaagttagatgatcatgaagggcctttttggcacttaacattcacagatgctggatggcagcactcaaatgcagatgttccttgacttatgatgggagtttatgtcctgataaacctctcataagttgaaaatatcctaagttgaaaatgtaaggaccgggcgcagtggctgatgcctgtaattccagcactttgggaggctgaggcaggaggatcgcttgagctcaggagctcaagaccagcctggggaacatggtgaaacccagctctataaaaaatacaaaaattaactgggcgtggtgctgtatgcctgtagccccagctactcaggaggctgaggtgggaggatggcttgagcccaggaggcggagcttgcagtgaaccaagattgcaccactgtactccagcctgggtgacagagccagaccctgtctcaaaaaaaaaagaagaaaagaaaatgcatttaatattcctaatgtaccaaacgtcatagcttagccttgcctacctgaaatgtgctaagaggacttcactttagcctgcagtttggcaaaatcatctaccacaaagcctttttttctctctctctctcttagagacagggttttactctgttacccaggctggagtacaagggcacaattacagatcactgtaacctcaaactcctgggttcaaatgatgctcccacctcagtctctgaaatagctgggactataggtgacctggctaatttgaaaaatttttttgtagaggtggggtctttctgtgttgcccgggctggtcttgaactcctggcctcaaatgatctttccagcttggcctcccaaagcgttgagattactgttgtaagccaccatgcccagctacaaagtctattttgtgataaagttataaagaaatttggatcaaaactcaaaacttgaagtatagtttctactgaaagcatattgcttttttttttttttttttttttttttttttttttttttttttttttttttgagacagagtctcactctgtcacccaggctggagtgtagtggtgtgatcttggttcactgcaacctccgcctcccaggttcaagcgattatcctgccttagcctcccaggtagctgggattacaggtgcctgccacaatgcccgactaatttttgtattttttagtagatacgagctttcaccatgttggccaggctggtctcaaactcctgacctcaggtgatccacccacctcagcctcccaaagtgctgggatcacaggtgtgagccaccgcgcccagccgcatattgcttttttaccattgtaaagtagcaaaactgtaagtcaagccattgtaagtcaggaaccacgtgcacacttttctgattgatgtacaaaaaggagactaagtctggcactaaagtcatccctggaaaacttatttattattattagtttttgctattaaatgagaagttagttatgtgaagaaagtgacaaagatgaagtaatacttttttaaaaattagttttattgagatataattcacataattagtttatttggctcatggttctgggaagtccaaggtcatggcattggcatctggtgagggccttcttactgcatcaccccaaggcgaaaggtggaaggacaggagagctcaagagagcaagagatggttgaacttctgtaacagattcactctcacaataaattaaaccactcctgtgataatgccattaatctattcaggaggacaagagccttcatgacctaatcatctcttacaggtctcacgtctatacactattgcactggggattaagtttccaatacaagaactttggatgacatttcaagccatagcaaccactatttaacttcagaacattttcatcactccccagaaaagctgtacacattagcaaggactcctcattccataaatctacttttttttttttttttgagacagagtctcactctctcgcccaggctggagtacagtggcaccatcttggctcactgcacccttcacctccaggttcaagtgattcttctgcctcagcctcctaaatagctgggattacaggcatgtgccaccatacctggctaattttttttgtatttttagtagagacggggttttaccatgttggccaggctggtctcaaatgcctggcctcaagtgatctgccccccttggcctcccaaagtgttgggattacaggcgtgagccaccgcacccgcccagatctacttttttatctgtgtagattgcctattctagacatttcatatcagtagactcatacaataggagtctccttgtctggcttctttcacttagcacagtgtttttaaggttcgtccatattgtagcatttatcagaacctcattcctttttatagttgaataaataatccattatatgtctgtactacatttgtttattcatttgtcagttgataagcaattgggtcgttactacttttgactattatgaataatgctgctatgaacatttgtgtgcaggtttttgtttggacatatttcttcgtttctcttgggtatatacataggaatgaaattgctgggttatgtggtaacactatatttagcattttgaggacctgccaaactgttccatagtagctatcccattttactttattttttttttgagacagcgtctcactctgttacccaggctggagcacagtggcacgatttcggctcattgcaacctctgcctcctggttcaaccaattctcctgcctcagcctcctgaatagttgggattacaggcatgtgccaccacacccagctaaattttttttttttttttgagtctcgctccatcacccagggtggaatgcagtggcgtgatctcggctcactgcaaggctccgccttccgggttcatgccattctcctgcctcagcctcccaagtcacccagctaatttttgtattttttagtagaaacagggttttgccatgttgccaggctggtttctgacccctgacctcaaatgatcctcccgcctctgcctcccaaagtgctgggattacagtcatgagctactgaattcggcccattttacaatcctatatgcaatgtatgagtgttttgatgtttccacatcttcatcaatacttgttactgtctttcttactgaagtaatcagttttgataaagcagccatatggcaaactaaacagtgaagagatttttacatgcatattagcttaagttgctctctaaacagttgtagtgtgtattggcgtatttataaaaatttgcactgtgagcttagcactaaagtaaatgttaatgactaataacataattcttcaacttgtttagcttttggaaaatttttcatttcaaaaatgaagcactcttgaagggaaaaaaaggagtaaataaaaaatgagttgtttgatcctctctctcttgattcaccagatgtaattgttctcttggagcatttttttttttttaaagacagattctctgttttccaggctggagtgcagtggtgtgatcatggttcactgcagcctcaacttttcaggctcaagtgatcctcccaccttagcctcccgagtagctgggaccacaggtgcacaccatcatgcccggttaatttttgtatgtttttgtagagacagggtttcgccatgttgcccaggctggttgaacttctgggctcaagtgatctgcctgctttggcctcccaaagtgctaggattacaggtatgagccactttgcccaacctcttgaagcataaacatataaacacacacacacacacacacacacacacatatttcttttttttttttttttttttttttttgagacggagccttactctgtcacccaggctggagtgcagtggtgcgatctcagctcactgcaacctccgcctctcaggttggagtgattctcctgcctcagcctcccgagtagctgggattataggcacgcgtcactacacctggcttatttttgtattttttagtagaaatggggtttccttctgttggccaggctggtctctaactcctgacctctcaggtgatccatctgcctcagcctcccaaagtgctgggattacaggtgtcagccactgtgcccggttgcataaacttatttttataaattatgtgcttctaaattatcaggtggactgtgccttacatgtataggcttgagtaggctgagcatggtggctcacacctataatcccaacacttttagaggccaaggtaggaagatggcttggggtcacgagttcaaggccagcgtggacaacatagtgagaccctgtctctacaaaaaaaaaaaaagaaaattaggtgggcatggtggtgcatgcctgaggtcctggcccctgaggaggctgaggtggaggattgcttgagcccagaaggtcaaggctgcaatgagccatgattgtatgactatactccagtttgggtgacagagagagaccccatctctaaaagcaaaaaaaaaaagtgaaataaaataaaaaatcgttgctatcttttattaatattctgttttgggagacattattcttatattttcctcacactttttaaatgtggtttcttttagttctttgaacatacttaaattgacttaaactcttgtctgttaagtccaatatctgggcttcccttgggaagagttttctattgttgttttttccctttatatgggctatattcttttgtttctttgcatatcttccaattttttgttgaaaactggacattttattttattattattttcagacagagtctctctctgtcgcccaggctggagtacagtggtgtgatccaagcaattctcatgcctcaactgcctgagtagctgggactatgggtgggcagcaacacacctggctaattttttttgtattcttagtagagacagggtttcaccatgttggccaagctggccttgaacccctgacctcaggtgatttgcccacctcggcctcccaaagcactgggattacaggcttgagccactgtggccagccaactggacatttttaatgacataatgtggcaactctgaaaatcagattctcctccctctccagatgagctctaagtcaggtaaaatacagagatatttgcaaatggggtattttggggaaccaccagacaggttaaataatgccaatttcctgggaatggtactttgaaggagctgtagcccagttctgcttcctctggtaactgccagtcttctggtcttcaatgtggatgcagctggtagttttcaaggctattatggagctggagagctaggaatgggactcagtcaagttaaaatgctacaaaactcactgttcttaccaggattcagctatttatctttgataaattatccccagtttgctaaaagcctatttccagagttctgaaaaaggtgattctattattttgccaatttttcattgtttttatgtagtagagaattttggtcagggaaagtccttattctgccatttttgatgatactctttccctcccctttttaggcttttattttcatgaatcttgtatctcttggtgttttgttttgttttgttttgttttgttttcgagacagggtcttgttttgtcacccaggctagagtgcagtggtgtaatcatggcccactgcagcttaaaactcctgggctcaagtgatactgctccctcagcctcccaagtagcagagactacaggtgcacaccaccatgaccagctaattttttaaattttttgtagagatggggtcttgctctgttgttcagactagtctcaaattcctggcctcaagcgatcctcttgtctcagcctttcaaagtgctgggattacaggcttgagccactacacccagcctaatttttgtatatgatgtgaggtcggggtccagattcattttttcatgtggatatttagttgtcccatcaccatttattgaagagactgttctttccccactggatgtttttggcatcctggtctaaaatcagttgactgtagatgtatgggtttatttctggacttctaattctactccattgatttatacatctttccttatgccagtatttcactgctttggttactatagctttatagtagattttgaaatcaggaaatattacttttacaacattttttctttcagtatttgttttagtcatcctggatccctcgctttttttttttcttgcgtcagtttgtttgtacaaatagcacaggaggatccccgccccatgcagacggcagcccgagggggtcgcagcagtccttctgttctcacatttgtagacagagatatctactctgaagcctttgtaggggcctgggcacctttgggagcttgagctggaactgaagctggagctgcagtctgggcgctgatttgatccttggccttggcctttagccggcacagcctgagtcccttggcagtgcgggcacgagcacacttcccaagcttggggtgggcaatgtaggcaagtcgatcgagcttgtggctgacaccctttgggatcttgggcttaacctccttgggctttacgagggccttgatagcctcggcacgtgcactcatggccttggcattgttggcctgcatcttcttgaggcccttcttgtgcttcttggcaaagtgcatgttcctcaggaacctggggtccatccacttaagagatttgtatctttgtgatcggggtttcttgatagcatttctgtgccattttcgggactggttgtgtgtggtatggttcttggacttggccctgtctgtaccttaagccgcagctcccgaagcacctagaactggaaccctcacatttttatatgattttagggctttgttttatttttggggacagagtcttgcagtgttgcccaggctgctcttagactcctgggctcaagtgatgttctcaccttggccacctctaagtacctaggacagcaggcatgcactaccactcctggcttccaaatgaattttggggtcagcttgcccatttctgtagaaaaggtaattgaaattttgaggccggcatggtggctcacgcctgtaattccagcactttgggaggccgaggtgggtggatcacttgaggccaggagtttgagaccggcctggccaatatggcgaaacctcatctctactaaaaatacaaaaaattagccaggcactgtgacgcgcacctgtaatcccagctacttgggaggctgaggcaggagaatcacttgaactctggaggtggaggttgcagtgagctgagattgtgccactgcactccagactgggcgacagagcacaactctgtctcaaaaaaaaaaatattttgataaaaattgtgttgaatctgtagatgaatttggtgaaatagtataactttaagcattataagtttcatttagagaaagtttggaagtatgtaaagtgaaaaagagtttaatgtttgtggttttttaattaggtaagcatataggtctcacttggtcttccagatctgtcaaaggaatgggggcaggctctcctagagccagaggcagccgcggtagaggaactaggaagctggtgcaccactgaacaaagatagagtgtttctcagggctgcataagacactcactgtggccaactcaggtgaaggttttccttcagaggccacagagtctccacgggaacagcctgccccgcttcagcattcctgtagagtgcttctgttgtatatcagaatctataaattgtggagcactcgggtggggatagatgtgattgccttatttgtcatgaatttgaaaaaagaaaacattttggaacacattttttacaagtagccatttgatatttgtttcttgaaaagtttatgagattttttttaaagagctcaaattttgttgaacatagagccataaataatggttgttttattgactttatatgttatgtgtttgtatccacagtgtccttctcatctcttgcctttgtaacctacctaattcctgtgttgccaacacaatcatagaaatacaaaggaattatggtaattggccataagtgacgaagtatgagttacatttaattatatattcaaaaaaggaaaatagaaaacctggttatcaataagtagacgaaactatataccaccattacataggttgcagttgaatatgtggtcaagcacggtggctcatgcctgtaatctcagcattttgggctgaggcgggaggatcacttgagctcaggagtttgagaccagcctgggcaacatggcgaaacctcgtctctacaaaaaatacaaaaattaaccaagcatggtggtacatctgtagtcccagctgctccggagactgaggcaggaggattgcttgggcctaggagttcgaggctgtagtaagccaaggtcatgccactgcactctagcctgggtaacacagtgagactctgtctcaaaaaaaaaaaaaagttggccaggcgcagtggctcaggcctgtaatcccagcactttgggaggccgagacgggtggatcacctgaggtcaggagttcgagaccagcctggccagcatggtgaaaccccatctctactaaaagtacaaaaattagccaggcatggtgggcgcttgtaatcccagctactcaggaggctgaggcaggagaatcactggaacctgggaggcggaggttgtggtgagctgagaccacgccactgcactccagcctgggcaacagcaagactccatctcaaaaaaaataataataataagttaaatatgtggtaaatgtgactttcagtgaaacgtatttgaacttttgtttgggagagcagatggtttcaagcaaatgttattcctgattttagctttatgagaagagtcacagtattccgctgttgtaggtatcagaaactacaaccagcgatatccagattctgctatttgaacctatccagagtcaggggttctaagaagccacccaaggtgtgaaactggtataccttgccaggctcccgctctgcacacccagagggaaactggtaccggagtgaggattggaagaatcgtgtctgtaaaccgcctgccagccactcccttctccaggctctgtttctgcaccctgcacttaagcccagcttggtatccgactgtcccgtcctactttgggacctttgccgtggtggtcctttaccttgtgagtcccacctgtcccttttgcacttgtccaaacctatcctacaatcaaggcctacctcagaagaatatttttttcgtaacaacctttttgatttcccttgccctttgcccatctctgcctttgctgatgccccataaagtttatgagtgctgtgtgtgtcaacagccctcaccataatctgagtactcatgtgatcctcctgaagcttgtgagctcttcaaagaggaaaggagaaaatgctgaacgtggatccaggccctgttcaacgtgccagcctcagctttgaaggggccagtctagaatcatacttttttggttgcattgtttttgtattactacttgaggaattttctaacagtcatcatttcatagttcagtgctcactattgtacctgctcctctaaggttataatatgatttcttattcatttgtagcccacctgtgtggataatagcatcacaggagttattgtccagaattactgtagccttcctcactttatcttatttttccccccgacaggaaaggacttagaagccttacaaatacatctgtgcattcttgcttcagactttacaactgagggccagcccagtctggaagcatctcttattaatgttacaaggaaaccgctacctcagcaaacaaaaggaatggaggaggagacttacaacaaacgccatttaaaaaaaaaagaaaaacttgttttcaggaaacattagaggaaatttggagaatttcagcattgcatagaagcagccttacaggtaaacggatttgacgggcaggctctgtcaaaattctgcagaagtttgatcttccttcttaaggactttgtgtgaagtaattctttactgcttttaaattgctgttgatcagcttctgggtttttgggttctaacttttttgggtatattgaagacacagtgtattacattatattacatttttaaacgttaagttatttttctgccattgtaaatacaagtatcaaaatattcttgcaaagaagtaaacatttttctcagcaagcatatccttttagtaagagagtggaatgctaaacagttcttatccagcattttggacatcttttattttttgtcagagatcctgtctacactgaaaatattaattatataaacctgttgtctctcacctctacattggatcacatggtcacctgcctcatggaaatgccttttttaaaacttcgatttgcagaactccactatttttatacctagctacagttttgagaaagaagaatcagaaccctgacccacttacggttgctgggacaattccccctcccgcatgtattgctgcagtgcccaggacagtaaaatggactacaagcggcgcttcctgcttggcgggtccaagcagaaggtgcagcagcaccagcaatacccgatgcctgagctgggccgagcactgagtgctcccctggcatccacggccaccactgcccccctgggcagtctgaccgctgcaggcagctgccaccatgccatgccccacactactcctatcgccgacatccagcagggcatctccaagtatctggatgccctgaacgtcttctgccgtgccagtactttcctcacagatctcttcagcactgtgttcaggaactctcactactcaaaggcagccacacagctcaaagatgtgcaggagcatgtcatggaagcagccagtcggctgacctcggccataaagcctgagatcgccaagatgctaatggaacttagtgctggggctgcaaattttacggatcagaaggaattcagtctccaggacattgaggtagagtatcttttgtgtcatacttgtgtaggaaaatatactacaaaggtaagtgagaatattgtcttaagtttttttccaaatcactgtaatagtagcctttgtcctcttgctgttggtactctgtctttgtaaaaaatgtgtgcgtgccaggttctgaattgctttcatatcaaattcagtaggttaagggtaggtgtggtggctgtaaccccagcactttgggaggccaaggcgggaagatcgcttgagctcaggagtttgaggcatcatagtgagaccttgtctctacaaaaactaaaaaaattaattagctgggtgtggtggtgtgcacctgttggatagattttaaaaattacttttagctgttcagagagttaatctggcattagtttttccatccttctacatccagaagccctgactactccagaagcccagaagctgaggtgggaggattgcttgagcccaggagtttgaggctgcagtgagccgtgattgcactgctgtactccagcctggacggcagagtgagaccatgtctcaaaaaaaaaaaaaaaaaaaaaaaaagaaaaattattaaacaaaccagccaatattttatattgttgtctttcaaattttcaagtcagaacctaattttcaaataccgtactggtaaaagttattagtgagtactgagaattctaaatacgattatgagctttatttgtggattttttttttttttttgagacggagtcctgctccgtcgcccaggctggagtgcggtggcacgatctcggctcactgcaaggtccgcctcctgggttcatgccattctcctgcctcagcctccctagtagctgggactacaggcacccgccacctcacccggctaattttttcgtatttttagtagagatggggtttcaccatgttagccaggatggtctcgatctcctgaccttgtgatctgcccgccttggtctcccaaagtgttgggattacaggtgtgagccactgcgcccagcctttttttttttttttttttttttttttaagtcagtttcgctcttgttgcccaggctggagtgcaatagtgcaatcttggctcactgcaacctccacctcccgagttcaagtgattcttctgcctcagcctcctgagtagctgggattacaggcatgcgccaccatgcccggctaattttgtatttttagtagagacggggtttcaccatgttggtcagactagggtctcaaactcgcaacttcaggtgatccgcccgcctcagcctcccaaagtgctgggattacaggcaggagccaccgcgcccagccgttttttttttttttttttttgagacggagtctcactctgtcacacaagctggagtgtagtggcacgatctcagcttactgcaacatcgcctcccaggttcaagcaattctctgcctcagcctcccgagtagctgggattacaggcgcccaccaccacacccggctaactttttgtatttttagtagagacagggtttcaccatcttggccaggccggtctcgaactcctaacctcaagtgatccacctgcctcagcgtcccaaagtgttgggattacaggtgtgagccaccctgcctgtcctgtggatttttattatattgaatctttggtttttagagagtcccacacgtttatagaataatttttccaattctaaattcacagttgctaatattcagatgtatttgagtcttcttcagtacatttcttggggtctttgatagttttttttttttttttttttttttaaaagacagagtctctctctgtcgcccaagctgaagtgcagtggcactatctcggctcactgcaacctctgcctcctgggttctagcagttctcctgcctcagcctcctgagtagctgggactacaggctcacgcagccatacccagctaattttttgtattttagtagagatgggttttcaccgtgttgcccaggctggtgtcaaactcctgagcttaggcaatccacccacctcatccttccaaagtgctaggattacaggtgtgagccaccacacccagcctctttgatagttaaaatgaaatattattcttttagggctctagattacaatgtaagattagaatacaagtttcattcaaagtaaagatgaccttttttcttgtcttattttaggaaatgatttattcaactttgatctcttatattcgtttgatagattttaaaaattacttttagctgttcagagagttaatctgacattagtttttccatccttctacatccaggtgaagttcttggatatgagatcctaggaaggagaatgttccttaccccatcctggggttaagatcaccagtcttttgggtcggatctgattatttaggtgcctgaataagctaactaacactgctttgggttaaccaaaaaaagaacttgacttttaagtaacacaactaatttttactgtgtttaaaagtgattttgaaggaatttccaagaagaacttagagttatttcttaagagacacagcatcattggtataaatcagggtttatcaagctttttctatgaagggcagacagaaattttaggcttcatggaccacatgtggtctctctcacatattctttgtttttgtttttgttttgagacgaagtttcatcttgtagcccaggctggagtgcaatggcgtgatctcggctcactgcagcctccgctgcccgggttcaagcaattctcttgcctcagcctcccgagtaggtaggattacaggcgcccaccaccatgtctggctaatttttgtatttttagtagagatagggtttcaccgtgtgggtcaggctggtctcaaactcctgacctcaagtgagccacccacctcagactcccaaagtgctgggatttacaggtgtaagccaccgctcccggccttgtttttatttttattttttacaatcctttaaaaatgtaaaagtcagctttactttgtgggcccatctattctatggatggggtttggccgatgggttctagtttgctgcacctgctggtataagtgtatagtcacttccttgggtcagggtcattctactttggatctatctttgtaatttttttttttttttagacagagtcttgctctgttgcccaggctggagtgcattggcgatctcagctcactgcaacctctgcctcctgggttgaagcaattcttatgtctcagcctcccaagtagctgggattacaggcatgtgccaacacacccagcaaatttttgtatttttagtagagacagggtttcgccatgttggccaggctggtctcaaactcatggcctcaaaatgctgggatcacaggcgtgggccaccgtgctcggccatctttgtaatttttttttttttttttttgagacggagtcttgctctgttgcccgggctagagtgcagtggcgtggtcttggctcacagcagcctctgtctcctgggttaaagcgattcttgtgcctcagcctcccaagtagctgggactgcaggcacgtgccaccacacctggctaattttttttgtatttttagtagagacgggtttcaccatgttgactaggctggtctcaaactcctgacctcaagtgatccacctacctcggccttccaaagtgttggaattacagaggttagccaccacgcccagccatctttgtaatttctaattgtttctatgatcatattttatacccagggatactgtcattttaaagtgtgtataaaatggcttgtcataattttatttttatttttattttttatttatttatttatttttttgagacagagtcttgctctgtcgcccaggctggagtgcagtggcgtgatctcggctcactgcaagctctgcctcccaggttcacgctgttctcctgcctcagcctcccgagtagcttggactgcaggcgcccgccaccacgcccggctaatttttttgtatttttagtagaaacggggtttcaccatgttaaccaggatggtcttgatctcctgacctcgggatccgcccgtctcggcctcccaaagtgctgggattacaggcgtgagccaccgtgcccggcgggcttgtcataattttgtttaaaaattcaacacataaaaaagcatgcctttacttctcaaaagaaacgtaagcagtgaaacttctactttcctttagcacctcattcctttccccagaagtgaccattagtaactggttgttgtatgccattccagactaccgtctgtacatgcatggatatgtacagatgtgtgcagctttgacttttacataaagaaccacgttgttcatccaccattgtgcctggtcactgcttgatagagatatggcaagacaatagttaggaacactttgtcctctcctagaaagtgttgaacaatcttagactctgacagctgtcaccccatgatgacatagcgctcttagctttattcaggacttcaggcaagagtggtttgaaatataaggccaaaggcttttattttaacctgagcattactgagctcttcttcaggacatgcttgcaggtattggaggaaacagagcttgacctgcagggccctttgctttccaaccctggagggcaagtgcgcctgttgcccagggcaggacaattagagaagataaccagctgtgagcagtaggggcttggtaagccgctggggcacagcagtacctgctttgtttcttctgctttcctgggactggcattgaccactgaagctgagaacgggaaatacttattgttgtagtttggaattttgacttggctttccacattgaaatgctgattagatagttggaatactaccatgtttttttgtacataatgggctgaacaggctttcccagacgagtctggaaactaagtatttggtgggttttccaatttatgcgtctattctgagtttcaaacagctgacttacaagtgaatttctaaatgtgattgccaagcataggcccgcagacttcacgtttcactttttccccagagcaatatttgttgtttctggaatttatgtactgccaggggatttagccataggccaataagggtctctctcagaattttcagcaactcagatgaaatggctaggcatttggattttttccttttggttttttaaggatttttataagcaaggccctgagagtcactttgacattcatccctggggaaagaggtctgtggcctaacattgccaggcaaggcctctactcaggagctcagtccaggactgtgggtgagaaaagctctggattcgagagtattcaaatatttgaccatttaagagttaggacaaaggatgatcctgtccccttgccatgtggccagtgcatgtgtgcagtgttcccaggtgcttctgacttacagccaagtttgggctgtggttattgattgacagatactgatgcctttgtccaggaatggtggttgctgactgtgtgctctgccaccctgccttggaaccagcagggcatatgtgagtcctgtccagtctatactcaccagtgactttgccccttagcccgagtggttcaccctcacagtctctctgttagagaagtgagttgtgactatggggtttcactagctgactagtgcctgtgacactggtacatcagcctaggaagtcagttactgggcacagagtcagaagacctgggtttggaaggtgacatctatcacttaaataaaattactttttcagtggaagtgtacataaataaaagaatcaaagtgacttgtgatttgtgcattcattccacagatatttattgtatgccttgtttctgcctgatactactccagcatgtcgattgcagtagtgaacatgacagaaatctctcccttcatgtagctagaagggagtttcgatcttagagaaggtagttagaaaaggtaccactgagaaggtgacattcgagtaaaggcctgaaagggatgagagagcaagcctgttggcccagaaaagaggattccaggcggagggagcgccgagcacagagtcccagaggcaggagccagcctggagtgttggaagagcaggaaagaacctgctgtggctaaaacagagtgaatggaagggagagaagcaggggtgaggtcagaagggtaaagaggggccactctggtgtctgttctgagtagccaggtaggaggcaaggtgaggtacacctctgaagggcaggggatgggagggcagcaggctgggccctgccattcttttgtagtgagcagcgatgccacttctccccttgccttcttcatactgggtagctccagggctctggttttacgttgggtcctcagtgttgagaggtgttggtcctctatgtaggcagtccaggaacccagggcagccatggggctcccaggagttgtatgtctctaaggagactgtattttataaattccagcatttttattgacttttcaagtatttaccatcttgtgaataagcagccagacttatatgtatatatacgtattatatatatatatgccagacatatatataaaatatgtattttttatatatgtatgtatatatatacacatacgcacacacatacatatatatacttatatatacatatatacttatatatacatacttatatatacatatatacttatatatacatatatacttatatatacatatatacttatatatatactatatatacatatatacttatatatactatatatacatatatagtatatatatactataaaatatatatactataaaaaaaaaatatatatatatatttttttttttttttagagattaggccttgccatattgcccaggctagcctcgaactcttgggctcaagcagtcctccagcctcagcttcccgcgtatctgagactgcgtagctgagactacaagtatgtatcactgggcctggctctcaaatctttacacagttgcatcttggctttcagtttgacacaacaacaaatttcttttgtatactatgtgattacctgtgaatatgtttgaaataatttatctgtgagtgctgactgactcttaattaaggaccttaattcaggtatattaacatttattttggatagatatataccagaaatattgtagagtaacaataatggaaaatattagaagctggtttcaaaaatacgatttgcattaaccttaatggaattgaatgtgcatcctgttccttttttttttttttttttttttgccctaaaggtaaaagtaagtgttacttgttttgactggtagatcttctgtaacagattatggagtaaatatttcctaatggtatgtgccagatgaaagttcatattgctgctgctaatcagaaactgaagttcacctcataaaaagcttgtatgaatccagttttgaaacttgctaatttcaggtcagtgtttttggcttacttttttgctgaggtgaatctgctattacctaaattgtcttcagactttagcctgtagaggaagctgtacttaattaagcagctggaatttgggtgattctgtaaatttgcattgtggtcaacaaacatgatttaccatctgtctagcccattctacgtgggtggaagccaccaaggccattgggcatctgtcactgtggagggactggaccctttgactttgatttgtcaagacaagcatgtgcaaccaactcattattctgataaatgctaattaaaaggagaaaagtaaggaaataagcaaatttcctgcttttccagtagaaactgtttttcatggtaaccaaatagccctaatggatgagagaaaaatctccactttgcagactgtgatcaattcggtgactcaaccagtggccaacagtggaggatgaaaccatttgttggaaggttgctgaggaaccgcatttgggagaatcaggccttccgcacccaaatctcattgatcagccttagtgtcatggaaatggagacaggtcatcacgtctcctgatgtgctgcagcaagaaccgcacaacacatctaatattaataatattctacttctccctctttaaaaaaaaaaacaaaccctgaaataatctaatcaagcttctaaaatgaatccagtctacaggaaatgtggggtgtagtgacgcaagttatgcaataccacgagaaggcaaccagacaaattcacaatgtggcatatcctgtaataagttgacctgatttgttcaacaagtcagtagcattaaaagaaattacacagaatgtactgttctagattaaaagagttaagcaatataacaaccaaataaaattacctttttggggttgaggttcaaaccaaatgtaaaacataatttttaaaagataagttgggaagcttgaacacatactgagtcttggttgattgggatttacttcaaaaaaagaaaaaagatggggaaggatagatggtaaaagcatggcaaaatgttaatggaattgaaacttttaatttttttgtagagacaggatcttgctgtgttgcccaggctgtgagcccaggtctcaaactcctgggctcaagtgatcctcccacctcagcctcccacaacacggggattataggcttgaaccactgtgcctggccataggattgaagtgttttgatgggtacatgggggcttgttatgttctgcttttgtgtacgtttggaccttttccaagtttgcaaaaagtgagagagaaattcaggaatgtattaaagacgtaatatatcagagtacccaataaataactccatttcatggagggcttttcgcatgtgaagtggtcttctaacagaaaggggagcattattgagtagttagaaaacccaaggtgtagggatgaagagaaaagcaggtgttcttcaaaaaaaatgaagagagtaaaagtgaatcaaaggagaaaatgggaacagagaaaagaccgtctctgaaagtgggaggccagcagcaggtgggagtcaaggaaagaatgaaatgttgctaattttggggactagtgattgaatggcaatgttgctgtctttttagagagtaggatttaaaattttgagttgctgaaaaggcttgcgtgatgtgctagaaaaattaggtttggtgggcagattagaaggaaacaaataggagagttcatggaatataatttcagatagaactggctttcctgaattaattttttggttctagtcagcttaggagatctcacaggattggataatggcctgttctggcagcctccctcctctttacaaaccaggaacctgagcacccataaaacagcatttgcctgaagtccttctgaggccagcccatgtatgggttatgtgtcctatgtgtctgctgcctccccactgcctcgggccagtgcagtctagtgcagaggggcttgttggcagaggccatccccctgtgagaacaggctgtcttgcccctctgctaatggtgaaatgtccagagccaggaaatcagaaatagcgtgatgtagaggcacccctgagcacccttgctcgcactagggcccctcctgagtaggcccagccacctggcctgccttcctcttctcccagctgagccacccaccctcctcgataaatacacatgagctagctgcaagcattgcacagatgacaaggacaataaaagcactccaggactggtaggccagataaataaatagactggcactaggtgtgatgagtgctgtgatgcagatggaaaatagcctgaagtctgttgattcggcaaaactttcaactgctcctctccccgcacccagctcactgtgccagggccagccctcataccagaacctcctacctaactgagagcgcatctgagcaggggcagggcagagagcccagtaggccctggggagagtgaggagatactggtagttgcctctgaatatccaatctcttttttcttttttcctttcttctttctttctttaccttctttctgcccccgcccccccgcaagacagggtttcactttgttgcccagggtggagtgcagtggaacaatcacagttcactgcagcctgaactcctgggctcaagcaatcctcctgtctcagcttcccaactatctgggtctacaggtgcatgccaccacacccagctaaactgtatttttttgtagagttggggttccattacattgcccaagctgccattttttcttagtaacaaactctcattttgttttccatactgtacctggaataaggactacacctcttagttccttaaagctgggagtggtcacttgaataagatctggttcatgacggtgtaactagaagtactgcatgagattagtgggatatctccttaaggggaaattggtgctccctcctcctccaattttctaccgtctccagtgcgtgcagaatgactgatggccatttaaccatttataatcgtgaagtcacctagaaataggagcctcgcatgagtgtgccgagcagaaagctaggaagtgggctccttgtgatgccctggcgtctccattccaaccctggtccatctgctctggatttgttttaccttagaaaaaaataaacataatttttttttcttttcccccctctgagatgtagtttcgctcttgttgtccaggctggagtacagtggtgcgatctcggctcactgcaacctctgcctcctgggtttaggcgactctcctgcctcagcctcccaagtaggtgggattacaggcgtgtgccaccacacccagctaatttttgcatttttagtagagatggggtttcaccatgttggtcaggctggtctcaaactcctgacctcaggtgatccccctgccctggcctcccaaagtgctgggattacaggcatgagccaccacacccggcaacatagttcttatttaagccactgtattggttttgggtttgatttttttttaattaaaaattattattattatttttatttttactgtagagatggagtctcactgtgttgcccaggctggtctcaaactcctgggcttaagcgatcctcctgtctgggcctcctaaagtgctgggattacaggtgtgagccaccatgcctggcctgtttctgtttttgtttttgttttgttatatgtagataaacctgattctaattaagtggaagcaggaagactagttaaggggctattagagcagtctaaatgagggatgatagtagtttggaatagaagggtagcagacgtgactagaagtagttatgtgtatttttactgtggtaaaatatatgtaacataaattttgccattttaaccattgttaagtgttcagtagtattaagtacacttacattgttgtgcaagcatcaccatcatccatctctagaactttcttatcttcccaaactgaaactctgtacctgctcaacaataactcctggttgccctctcctcccagctcctggcaacgaacattctttctacctctataaatttgactactctaggaacctcgtataaatggaatcatagaatatttgtccttttgtgacaagtgtgtttcacttagcataatgtctttaaggctcattcatgttgtagctcgcatcagaatttccttctttttaaaggctgtggccgggcgcggtggctcatgcctgtaatcccagcactttgggaggctgaggtgggtggatcacctgaggtcacgagtttgagaccagcctggccaacatggtgaaaccccatctgtagtaaaaatacaaaaattagctgggcatgatggtgaatgcctgtagtcccagttactcaggaggctgaggcaggagaatcgcttgaacctgggaggctgaggttgcagtgagccaagatcgtgccattgcactccagcctgagcaacaaaagtgaaactccgtctcagaaaaataaaaataaaaataataaataaataaaggctgataaatattttagcagttgtattttgcatggtttatgacatgcgcacctgggtcactcactccctggtagtgctatttactgagatggggagtagtggggaagagtaagttcagataataggtctgtgatgcctattagatatcccatgggtgatttctacaggatagttgcatacacaaatctggagttgagggttgaggtccagaacttggagaccctcagtcagtagacagatgtaaagctagagaactgaaggaggtcatcaaggaagagcgtagctggagaatgagtaaaccctggggcactcccacatttacagtcagaagatgaataggaagccgcccaggagtctgaaactggaacagctggagagctaggaaggaaatgaagcaagggtgatgctgctgaggggaggtgaggcctcctctccaccccattccaagatttgccatggttacaccacttggaacactgtgcagatacagccggctgggagtgtccctgtcagatggggatattgggatccctgtctcagtgcggcaacatgggaggcatctagtgcgacagagcggcctcacccaagtgatgtgtcatgatgaggataatgttcatggagactgatttccatttgccagttccctgtttgtctttgtaatcagtttatcaatagtattcttgatggaagtgacaaattttaacaaaaagtacactcatgtgaacaaaaagaattttctgacctctgatgggctcttgaggccatatatcaggataacttaaatatgtttttatctctgcccacaatgtaaacttgtttatggagaaaacttgcattttgtttttatttattttttgaaacggagtctcgctctttctcccaggctggagtgcagtgatgtgatcttggctcactgcaacctctgcctcccaggttcaagcaattctcctgcctcagcctcccgagtagttggaatcacaggcatgcaccaccacgcccggctgatttttgtattttttgtagagacagggtttcaccatgttgactaggctggtcttgaactcctgacctcaagtgatccacccgcctcaacctcccaaagtgctgggattacaggcatgagccaccgtgcccggccaaaacttgcattttgaatgggaaaaattactcaagagtaattaacgtggactcagttatcttgagtggcctttcattttttccctggatgatattttgtaattattattattaggtatgctaaggtttatagcagtgtagctgctataaatataaatatagaaatgtaaaacttcctgtgtgtattgatatggtaacagatttttaatatattttggaaagcaaactataaacacacaatctactttttgcaaaaaaaaatctataggtacaaatatgggctgtttagtaatcgtacaatcaatggttatacctatttaggaatatttagaactatttgtatgtttgtatagctaatcttttcccccctgatttattgatggtgagtattactgatacaaaaagttttgtgcaccacagtgctttgcccatgaaatatgagctcagaaactgcctgtgctgttattttcaccagcagtgaagcagcgtgtctgggggcagaatgtactcttgtctgaattattagcatttggtgttggttctgccacccttgggcctgagcttgctttctccctcgtttgttctaaacatagcatggcaccttttgtatcctgtaggttattgctgactgcaaggagactttgttgttctttagttagttttttacatattagtttcagtaagcctgtttcttacatttttctactgtagcataatctttgtaagtactttctatagcccaggcatggtctgctgcattctctgtgtctctggggatgcatttaggtctttgtgtcacattctggtgtgtagctcattatgtaatgactcgaatgatcatcagaacaaaagatacctcattaagaacaaggttgaggacactaggaacctaatgtaacatttaaggtataaatgagtattgaagagaaagaaatgattgaatgctttggaatttctaatacaagcacccatcttgtacctacttacactggacttttaaagtgatcggaaataaatggttgtatgagagttttacttgttcctcattctaaagggatatgaaaaagatgaacttgagttcatgaagttgagcagaacaatgaacttagtgataaattatttgtattgatgtgaaaatcacaccatgttttgggaaatggggtggacttgggcactccatagttccaaccacatgcaggtattataggctgagtcaggcctgagcctagaagaggaataactgcaactaaactttgaaatattccaggaaagcagagttgacatgtaggttgatctgcaacaactacagtggtatagaaagggtggtcttggctgggcgcagtggctcacgcctgtaatcccagcactttgggaggccaaggcgggtggatcatgagatcaggagatcaagaccatcctggctaacacggtgaaaccctgtctctactaaaaatacaaaaaattagcctggcgtggtggtgggtgcctgtagtcccagctacttgggaggctgaggcaggagaatggcatgaacccgcgaggcaaagcttgcagtgagccaagattgtgccactgcactccagcctgggcaacagagcaagactctgtctcaaaaaaaaaaaaaaaaaaaaaagggtagttttttggtgctccaaatgggaaggccttaaattaaaatctgttttacaatctgaataaaatataaatatcatcaaaaagaaaaggtattctggttatgtacatgaatacaacatccttagcagcagatgttgtgtgtgtgcaagggaataggaaggtaaagatgcacccttctcctccaccatcaagggttgctagaaaacaggctctcattcagtagaccccgatagctgtctgtaatccatagctccttctctgattagtatttatccactattgtggcttcattctggatcttgtcataggtagaaagagtagcctggtggttagcaacacagttttcggagtcaaacagacctggtgtcagatccctacttattacctgcttgacattgagcaagtttctttatctctgtaaacttcagtgttatcatccgtaaaatgggtgaattgctcacaccccacagggatggttcaccaaacataaggtgcttggtatttaaacactcaataaatggtagctgttgatagagcttcactggcattttaaacttaaaaacctgcctttggccactctgctcatccactccccagcttcccccatgtgttctgcaatttgactgaaccacacagtccaggaaactttctccatgtgaaggagaaaatagctttccacagccctggggtcacactctcccaaacttatgtcaggaagacgcccaaagactggctcattcctgggtcaaggagagtggggtctgtttcaggagaggagctgagctaagacctgagatcctcggaggggaaaggtgggcagaggcaggctggaggttgagctctgtactctctcaagagaaggtggtggttatgcatctgttactctgggtaaatttttagagcagatatctgatgaaacagctgtttccaaggtccagcgttaaccattggtttgattggctttgaataagttatttacaacacagatattttgttacaatcataatttgtatgactgagttggtctccaggcatcctgggtaggagagggaggtgtacagtagctgagctgttgtcctcattccttatttataggaaagaagcttaggttaaatgactcatccaaggtcaaacacatcctaagtggtggagacaacacagacaatgccttttaaactgacctgtgtctcttcccccactccttcctacagcagggttctgccctccttactgccaccccacagcaagagggcttcctccacctcattctccccaggggtgatggccttgtcagagagcatcctgttcttgatctgggggccctccttcaggccttcagccattcctcagaactttgccccttagtaggggaggggacagggtagctctccctttgccctcggtcatttccttgaggagccttttccttcccatccgtctgtgttcctttcccagcagcacccggccttgcatatctgttcattgcctgttgtcttccccattagaatgtcgccctggcgagagcagggacttgctcattctctttccagtagtgttcccagctctttgtgcttggtgcatatcaggcatccccatcttatatatttattgagagaatgaatgactaagttgtgtccatcagagctgtgagagtgtgaacccagagctaatggagcatggcgtcttccctttttcctcctcctccagcttcccatagctgccaaggtgctgaggaaggagtgggaggaatagtttgtgtccctgaggagccggctcactccccctccctgtgtctgcagtgggtggggagattgaggaaaccctcagcctacaccagttaaggtggagttcctgtcacatgcaagccgatgccagtttagagtctgctgaaggcagtggggcacacaggtgaagggcatggacacttgagtcaggtgactggtccaccacatgcagattgtgtcccgttgacaaaattttgtagcctttctatgccttgatcttgttgtctatgaagggaggatgacctcatagggtggttcctgggattgaatgcgctagcccatgtgactctccagcattggtcaggtacaggctgtgtgctccactaaagctgtctgtgtgctctacaggactaaatagctgctgcttattctactcctggcacctgtctaactggcctaggtgcgctgccttcgtgtccctcaccctgcccagtctagcacagagcactgggggaagggctctgaaggaggtgtgagtggaagcccaggagtttggggggcttcagcctgtgatgtcggttgttgttccctctggagggcaagtgctttggtgtgagatttgtgtgcggttttttgtttgctttagtttggtcctggtgatttccacagggtgaggagggattcggagataataagtgtcttgctgggaactggcttgcccctgcttctccaagaagaaacagctctgactcttgggaactgagagggcgtgtggcaaaggtagatgctgaggcgaggcaaggcgagaggtccacatgcgtgccacaaggcagagagtccacgtgtgcacctgaggggagaggaaggttgagtcttactgtgtgctgctcaagggacaggacagtgcatgggcactgtgctggattttggttccttgtaaaaagcaatggctatagttccctgaccttcaccacttgcgtgaggcagtgggctgagggccggctgtgagtaggctctctcaggtccactcctgctcagctgggtgaattgcaaactcaataaagtaagttgttgtgaataagtaatctgcataagccaaagaaatataaaatatcttccacaaaaaattattagggagcaggataaaagagctgcaaaaggtttttgttggtattattgccaaatctgatgtgggcaaaacaactatgagaaattaggaaaaaatgtcaataatctggaaggtttgtggtcaagttgctttgtaagtggccagtttttgccctgtgttaaagaggaaataaggccgggcatgggagctcatgcctgtaatcccagccctttgggaggccgaggcaggtggatcacctgaggtcaggaattcaagaccagcctggccaacatggtgaaaccccgtctccactaaaaatacaaaaattagccgggtgtgatagtgcaccgaggtcagagaatcgcttaaacccaggatgtggaggttgcagtgagccgagatcacgccactgcactccagcctgggtgacagagcgagactccatttcaaaaaaaaaagataaataagaaatgatagagaacacattgtaactgtggtttatgcaagaaagtaacagggaggagcagcaaaggagctgtcagaacagccttagcccataccagaaggctgccagagaaatgcacaatcatatctgaaaatgtttgtggcacatagtatatatttagtatacatcttattataattacatattcatgtgtatagtattttttaagttaatttcctacttggactattagcaaccaatcactgatatatatcaggttaatgggtttctactgtactcatgagtggagctgtccattatattttcttgactcctggaagactggtctgtcagctttgtttcctaagactggaatgatgacatacaactatgttaataactatgttaacactcctactaaaataaccggtatatttggattccattttcaacggaatgtcttatggtcaaactggccttctttcagatttttagttgcatggtttttcctttaccttctgaatactgtatggacgtaattgctgttgtggatggctgtggttcagcaggagctcaaagacaccagaagtggtgtgagtccagatatagggggtggagacaggattgggggttacttggtgggaaatgggaagaattatttcaaccttgggccttgttatttgatggaaatgttttgacttccaggcatcagtcaccgaggtccaaacacaaaaacaaaggcagatccttctgaagcatggtggccttttaactttgtatgattttggatttccagttaactattgcttctattcaagttggtcattgaaaatttactgcgcgaatccaacagcaacccacaacctaaacatccctggctgtcttgttttcacaggtgttggggcgatgtttcctgactgtggtgcaagtccatttccagtttttgactcatgcgttacagaaggtccagccggtggctcactcttgctttgctgaggtcatcgtgccagaaaaaaagaacagcggcagtggcggcggcttatctggcatgggccacacacctgaagtagaggaagctgtgcggtcctggcggggggctgctgaggtaaccctggctttggggagattggtgcctgtgttcaaataggagaggctccagagggcctttgcctgttgattctcaaaacagccatttcatttagaaatgtacattttaaactgttatcattggcttgttcattcatttaacagtgaacatctttgtgaatgcccactttgtgccaggcatgtgccaggcactaggatgacaacctctactcacagcctcctgggagaataggcttacaaaaacagggctaaggggccaggatggagatatgcgggagccagaggaagggagggccctgtctctgaacggtagtgctgcaggaaagcttctaagatgggggaccagtgagaagaggctggcacccaagtcaggaaagacggggtggagctgtctggggagggtaagtggccagccaggcagcgaggcaggcgagcaggagtgtttggcagacggatgggatgacaggctccaaagatacaaccacagcagggcgagagctcagtggacacagggaattttgtgttttttgttagtcaaatcattccctatagaagtgcttggaatctttgtaactttttaaattctttaagtttttctttttctttttcttttttttttttgagacagggtcttgctctgttgcccaggctgaagtgcagtgctgcgatcaagtctcactacagcctgtacctccgggctcaagagatactcccacctcagcctcttccaagtagctgggactacaggctcatgccaccatgtctagcttattattattattattacttttttttttttttttttggtagagatgaagtctcactatgttgtccaggttggtcttgagctactgggctcaagcgatccacccacctctgcctcccaaagtgctgggattacaggcattagccactgcacccagacaagattcttttttttttttttttttttttttgagacggagtctcgctctgtcccccaagctggagtgcagtggcgtgatctcagctcactgcaagctctgcctcccaggttcacgccattctcctgcctcggcctcccgagtagctgggactacaggcgcccgccaccaagcccggctaattttttttttttttttttttttttttgtatttttagtagagacagggtttcatcgtgttagccagggtggtctcaatctcttgacctcgtgatctgcctgccttggcctcccaaagtgctgggattacagatttggacaagattcttaattggtctaactctgcctagatcctcatttgtcagtgctttacatgtgatttcagcagttctccagtatgctttatgtgacttcatgaagtttttttttttgagacggggtctcactctgtcgcccaggctggagtgcagtggcacgatcttggctcactgcaacctccgcctgccgggttcaaacaattctctgcctcagcctcccaagtagctgggattacaggcgcccgccaccatgcccggctaatttttgtattttagccccagctaatttttgtatttttagtagaggcagggtttcaccgtcttggccaggctggtcttgaactcctgaccttgtgatccacccaccttggcctctgaaagtgctgggattacaggcgtgagccactgcactgggccaacatgaagtcttttatcccttggaagatcagctatttcccagcacagcagatatgtttataaaatctagccatcatgcaagagctagactgagtggttggctccctagtggatagagagcgcagtggtgtgggatggtatggcatggtcatcagggataatgtgaaggagaattgtgggattctcctctcgtggtgacaacctcatgactaaatggtgggctgcagggagccgctccggtggggggattctagcctagcgcagggttgctttcctagtcactctggtgtggcattctctattccttttccacagccagaagaatttaagcttaaataaaaggcaatcaaaaacagctctgaaaaagtctgttttaaggagactttgcctataatcagtgacatttcttttgggagacagagtttcgctcttgttgcccaggatggagtataatggcgtgatcttggcttactgcaacctctgcctcccagattcaagccattctcctgcctcagcctcccgagtagctgggattacaggcgcgcaccacgacgcctggctaatttttgtatttttagtagagataaggtttcaccatgttggcctgactggtcttgaactcctgacctcaggtgatccacctgccttgtccttccaaaatgctgggattacaggtgtgagccaccatgcctggccattagtgacatttcttgtaggcattttaatacttatttctttccagtatgagaaataaaaaataaatcttagaagttgagactttaggacttactgctccattttacagagtaaaagataattttcttttttttgagacggagtcttgctccttcgcccaggctggagtgcagtggcgcaatctcggctcactgtaccctctgcctcccgggttcaagcaattctcctgcctcagcctcctcagtagctgggattataggcacccgccaccacgcccagctaatttttgtatttttagtagagatggggtttcgccatgttggccaggatggtctcaaactcctgacctcaggtgatctacctgactcggcctcccaaagtgctgggattacaggtgtgagtcacccacctgggccaaaagataatttttttaaactatcccagcaggcaaacacagattaaaagataatttatggttagcaatatagtgattcattaaataatgtctagttcaaatcattccataattaacttggcaaagtatttcttttctttttttttttttttttttttttttttgaggtggagtctcgctgttgcccaggctggagtgcagtggtgcgatgttggctcactgcaggctccgccccccggggttcacgccattctcctgcctcagcctcccgcgtagctgggactacaggtgcctgccatctcacctggctaattttttgtatttttagtagagacagggtttcactgtgttagccaggatggtctcgatctcctgaccccgtggtctgcccgcctcagcctcccaaagtgctgggattacaggcgtgagccacggcgcccggcctagtatttcattttatgttttggaaattttctttaataaaattttcaaaacatgatttttcacatgttaatattgtccagtctctagttttattatttcaatttcatgccatttgctgcattgttgtcatttctttttaattttcactgttttcttgcatgttttggtctgtctttcatgctaaagacttcctagggctttctttctgttcatcagaaaggccctggaatgctaattggaggctgtgtgtgggggtgggacctgttagctttattgtagatggctaagccctgaggtccagacctgcaccttgttgccttgtcatgtgactttacaaccctcggtgtcctcctggctgctgggccccagcctcctgactgttcagctcacacacgtgaacctaacacctgccttggtcccctgctccatcttctagacaactcatgctgaggaccagcccacaggaggaggcctccgagttctctcttgacgtcttcaccttgaccttttttgccaccattttagtctgtccaggcctttctgccctttctacattccctttgctttcagccagtgatgccaccccctactacactgagcaaatagaatctccctgatggcagcccttcttcctcatgtggccaagccaccaccactcctgccatccctcttcacaaccatcttttcttccttcccctgcctcatgacagcagaggaggtgccctctcctcctgtccaggcttgccccgtgctggccttgcccccatcctcgagggcccagcttctgtggtgcgacctagtgttttctctccctcatcctcagcctgttcccaccagtacacaaagatgcttcccacagaaaagtccactctgccctgccctgtttctctgctcttttctcagccaacttcttggagtagttgtctacctttttttcacctttcattcattctaaaaaattactattttatttttactgcaccttgtggctccttactgctcctggcacaccccgtggacagtttactcagagtagtctaaaaagtaattattattgaagtatttcaggcacatagaacatttcacacccatcagtgtatcttccttttagctgcctgccatatttgctcatgcctgttacatatttttaacagaaaaatatcaccagtgcacttttttttttttttttttgagactgggtcttgctctgttgcccaggctggagtgcggtagtgatcacagcttactgcaatcttgacctcctcggctcaagcaatcctcctgagtagctcagactataggcatgcaccaccatgcttggctaattatttattttattttactttttatttatttttttaaagacagggtcttgctatgttcccaggccggtcccaagctcctaggctcctgcacccggtctgtaaatgcacttgaatcccttttgtacctctccactttcttattcatccctttgtctctagagataacctctgttgaatttgaagcgtgtgatccttgtgcatattttaatattttttccgtatatgaatgtatctatacataaggtattattttacacagtctgaaactttatatacataatgtcattcagcttgctgaaatctggcttccactcctatacaagaacatgccttctcttatcaaggtcattggtgccttcttccatgttttcaaatccagggaaccctttcaacaactttcagcagctcacagcagtgtggagaatattcctccttggaaatactctcagcttgtgacatccaagaaccaacctttctttcctcttgggtcatcctttcttcatctagtttactggcttctccttcctcaacacaatttctgaatgtgagtttctccaggctcagttctagctgcccttctccctaggggttctccatccagtcttgggactgaaaaaccacctgtgtccttggagggggctcaaatgtgtgtgatcagtgagcagcccacttcctgtgggcttcaggcccctgagctcagctgctaccgggggtctcacaggtggctcaggcgtagcctctctccactcacctgttcctccctagaccctctctatgctagtgagtggtgccatcccacactggcttcacttgagaaacctgagatttatccttcagcatttccgtcatgtctacacccagtccaatccttaagaaaacccggcagttcccacctccaaaatcttatcccagatctgtccccttcttccacgtccttcatcgctacccttgttcagggaatcgttacttctcccctccctgtcttgctcgccttcattttaaaattggatgatgtcgcttctcatttccttagggtagcatgtggacccctcagcacgacctgcctagacctgcctagtctggctcctgccttgatggccagccttatcagtggccaccctgccctcgctcactgggctctagttccttggatgtgtctttctttgttaccttggatcctcggcctgtttcacggacccgtctgtaggtcttgacaccccccaccccaccccacacacatgcaattccattcacgaccttctcctctaattctcaccctaagtgctgctttctgggtgtctaggacattccctggtatagtcctctgtttgtttcccgcagtgttttttctccatttataattctgtgttttctttgttcacctttttggccctgaggctctcagctccaggaaggtaaggagcagctttgtgcttcagcacgtacctaacataccaccttgtgagctaaatatttgactgaaagattcttagaaagagtcaaacagttttaaactgtgagactcttaggcttcaggcaatggtgtttacatacagtttgtgaaaccaaagctttggaactttacggcattatagctgctagtcattttcctgtagtctgcaagttttgtaaatattacaactcctacactggcccagcagaacaaaagctaactgctaaaaaatgttacttggttcacagaattgcaacaaaaatagaaatctaaaaacagttcatctggaatcccatctaataaatcaaatatatatttttctgtattctcttcttgtcctgatccatgtatctgttttctgcatttaatcgtaaaatgacagagattagtttctccttttctatcttgcttatctactcttcataaacatatgtagtgactgaataataaatatttacttttctgtgcagatttcaaaagctctgtttttctgttaatatgccaatgtatatttttcctgttatgtattcatgtggtcttttccttcactgaataggaatgccaaccatgtatgttcttcctttttttttttattctggaaactccaagtaccaatattctaggtaacctgtctttttaaagcaggaaagttaaaaatgtctgagtatatacacacatatatatgtgtgtatatacatatatatataacaaataacaagtaggtaagtcttttttccagggttcctaaaataaagggagatttcggccgggctcggtggctcaagccagtaatcccagcacttcgggaggccgaggtgggtggatcacctgaggtcaggagttcgaggccagcctgaccaacatcatgaaaccttgtctctactaaaaatacaaaactcaaccaggcgcagtggtgggtgcctgtaatcccagctactcgggaggctgaggcaggagaatcgcttgaactcgggaggcggaggttgcaatgagctgagatagcgccactacactccagccagggtgacagagtaagaccttgtctcaaaataaaataaaataaaataaaataaaataataaaataaaaaataaagggaaatttcctttctcttcaggatggttaattaggctttcaaaatttgggctgctcactttgcaatacaaacaatctagaacttctagtttatttgcttagatggtttattgctgcattttacttgagggggtttttcttgttgttgttattgttggtctaatgttgctagaactgtaccaccctcttttacctaccagttactatatatgttacaggcgacatctagactaagagaaagaggctgtgatggttgcctggcaggaattgaagttcaacaactcttttgttctcaaagtgcagcaattcctgagcaccagctaaaagaactgaacataaaaatcgacagtgctttgcaagtaagtttttcagaactgacatactgatttccacgggatagaaacaagggagggagttaaagttgtgatgttgaatcaattagaaagggttatagagtagtaattgaccttttaatagctatagaaatttaagatttctatttccattgaactttgtcatcttataatttgctttacgatcttgattgttaaaaataatttatttccaggcatataagatagctctggaaagcttaggacactgtgaatatgcaatgaaagccggcttccacctgaatccaaaggcgattgaagcaagtttgcaggtacacttttccttcctaaagctctggggacctatggcgctgctcctgcagtctagtgtgaaccaagtgttttgacagatgagcgatgggtcacctctcctcttccatccatgccttttccagggctgctgcagcgaggcggaagcccagcagacggggcggaggcagacacccccgcagcccatgcagtgtgagctccccaccgtccctgtgcagataggatcgcacttcctgaagggcgtctcctttaatgagtcggccgccgacaatctgaaacttaagacggtagctttccatggggttccagcaaatgagtgtgaacttgaaaatagagttcttaagagaaatgtaaaggcttgcgaaggatgtagattaaaaaaaaaatggggccgggcgtggtggctcacgcctgtaatcctagcactttgggaggcgggcggatcacctgaggtcaggagtttgagaccagcctgatcaacatggtgaaaccctgtttctgctaaaaataaaaaatcagccgggtacggtggcacgcacctgtagtcccagctgttcgggaagctgaggctggagaattgcttgaacccatgaggtggagatggcagtgagctgagattgcgccattgcactccaacctgggcgacaagcaaaactctgtcttaaaaaaaaaaaaaaaaaattaaaaagcagacctacggagactttaatcagacatttgccaagcaagttttcgttttgttttgttttgtttttttgagacggagttttactctctcgtccaggctagagtacagtggtgtgatctatctcagctcactgcaaccttcacctcctgggttcaagcaatcctcctgcctcaccctcccaagtagctgggactacaagcatgtgccaccaagcctggctaatttttgtatttttagtagagacggggttttactgtgttggccaggatggtgtcgaactcctgacctcagctgatccaccctacttggcctccaaaagtcctgggattacaggcatgagccaccgacctgggcctaggcagttttattcataattttattcagatgtttaacagaaagggtttgaaagtacactataagatattgtttatgattaatgtctctcagtggacttgtatgaattaaataagaagagagatgttgttataatgctgcagtgataacgattatttgtggaacatcatgtgttccagtcattgtgccaggtgctccacatcattgtctcacttaatgctcacccatgaggtaggggtgctgccctttggcccacctgccacatgggaactgatacccaaggtcacacagctagaaagtagaagagctggaatttgagcttatgtaatctgtttccagagcctgaacacctgactacttggtcatccaaaataaaattgagattttaattagtatttacttgtatcagatgattttgtttccctatttggagggattcagaatttcagaattcctcaaccagttcacatcagtagattgctaaataattttgtgctagtatagaaatacctgtgtatattatcgcatatgtatccatatctagtcatttactctatggggctgagaaaatctctgagagtgattgatgataattactaaggaaattaaaatggcataattagggtgtatttaaaatgctcttcttgagccaggcgtggtggctcatgcctgtaatcccagcactttgggaggccgaggtgggcagatcacctgaggtcaggagttcaagaccagcctgggcaacatggcaaaactgcatctgtactaaaaatacaaaaattagctgggtatagtggcaggcacctataatcctagctactcaggaggctgaggcagaagaattgcttgaacccaggaggtggaggttgcagtgagctgagattgtgccagtgcactccagcctaggcaaacagagcaaggctccatctcaaaaaagaaaaaaaaaaaatgctcttttcccaggagttcaagactagcctgggcaacatagcaagactccacgtctacaaaaaatttaaaaattagctgagtgtggtggtgtgcacctacctgtgtggtcccagctactggggaggcttgaagcaggagaatcacataagcctgaggggtctaggctgcagtgagccatgttcgtgccaccggactgcagcttggacgatagaaaaatacataaataaaatgctcttctcttgaggatgattgtataaatgcatttttacaaattttagaaccttgcatggctttgtcttgaggtgtgaactctcttcttatcaatctatagcatacaatgttacagctgatgaaggaggcaggctgctataatggaatcacatccagggatgattttcctgtgactgaagtgctgaaccaggtttgcccttccacatggcgaggtgcctgcaagacggcggtgcagctgctgtttggccaggctggactggtgagtgagcgtgggtggtggatgataggtagaataccaagatgtttcaagcatgtgaggatgtggtgcagacacatgtgtgaaaatattgaataatttaaaaagttatttggtgctgtggaatttagaccaggcaggtagacaaggtaaaggaagagcagcatttaaaaatctctttaaaaagaaaaaccagattgataatatatatttgcagggaacctagttgcaaaatgatgctatgggctttgcttattttaagaaaaaaaccattacagtctgggccccatggctcatgcctgtagtcccagcactttggcaggaggattgcttaagtctaggagtttgaaatcagcctgggcaacatagtgagaccctgcctcttttttttttttttttttttttgtgtgtgtgtgtgtgacagactcttgctctgtcgcccaggctgcagtgcagtggcgcaatctcaactcgccgccttctgggctcaagtgattctcctgcctcagcctcccaagtagctgagatggtaggcacccgccaccacatctggctaattttttttttttttttgagatggagtctcgctgtgttgcacaggctggagtgcagtggcgtgatctcagctcaccacaacctctgcctcccgggttcaaatgattctcctccctcggcttcccgagtagctgggactacaggcacgcaccaccatgcctggctaatttttgtattttttagtagagatggggtttcactgtgttggccaggctggtctcgaactcctgacctcgtgatctgcctgcttaggcatcccaaagtgctggaattacaggcatgagccaccacacccggcccttaaaaaaaaaagaaaaaaacattacattagtaacaagttgacagggccacttgatctagcccctattctggagctacattggatgtctgttgctcaaacatcccatgcttcttcctgtcccaggcctgtgctcttgataccccttttatctgaaaatactcttctctctgattatcatgtaggtcactccttatcttcttggtgttagctccaaaatcacctcctccaagaggcctcccttgaccacagtggtataagtagtacccccatccagtcactgtataccgctgctgtttatctctttcttagcaataaagtaacatcaactaaaaagtaatgatttgttcatttcatctttcagagaaaaaaaaaactttgcccagagttgggtgggtcaggagatcaacatctgaaatcaccatttagctttttgtttgcatcactgacccatagaatcttacgtatttgatctccctttctagtaaacgactacttttcaaaaacatatggtggcagggcgtggtggctcacacctgtaatcccaacactttgggaggccgaggcaggcagatcacctgaggtcaggagttcaagaccagcctggccaatatggcgaaacctcgtctctaaaaatacaaaaattatccaggcgtggtggcgggcacctgtaatcccagctactcgagaggcttaagcacaagaatcacttgaacccaggagtcagaggttgcagtgagccgagattgtgccactgcactccagcctgggtcatagagtaagatccagtctttaaaaaaaaaaaaaaaggatatggcatttcagtcagaggttggaaggacctaattagagattaagaaaattaaagaacttgttttttagtctggttcctactttattcacaaaaagagctattgagggtatactgtcgttttgtttcaagcgggttagggctcaggtggcccagctcacagtggggctgtcttgtggaggctcagatgagggcttgttcacagtaatgagtcacatttcctttgggatcttttcctcagtatagggacctccaaaagaagtagtaaaccagagatgccttgctgaagcgtggaagagcccattggctttagtatatcgatccatattcccagagaccatttagctgaaactgcaaggaccatgccaatgagttcccctgaaaggagtatgcaaaataaggccaaaaggcacaaaggctgttttgagaaaacactgtagattaaaaaaaaaaaaaagttccatgttattcagagagcagaaacttcttcctagttccttgcgtcttgattgtaggacacatttctgtgtgactttaggttatggttctggggatgggaggagagaggaaacacctgtgtggtccaacaatggctattcctttgacaggaagttttttccaaaggtcattgcagatcagctatgggaactctgtttaaaccagtgaaagctggctccattagaagctgaatttggagtatgatacacaactctgtacagttttaccccttctgaaatattacagatttggttttaaaatattttatgattttttaaaacattcttttagttatttgaaaatatattcatcactttgtcaaactctagattacataggatactcttatcacctatctagtattaaagactcttcctggaaataagaggaaatcattcaaagaagggttagttcttcctctgtcctgaagtaattcagtttttattgatggttgaggataagataatctttaaaaaagtttcatccacttctgggcgtgtcatgacaaatgggcttatctgaagcattggtttgacttttttgtttgtttgtttgtttgagatggagtcttggtctgttgctcaggctggagtgcagtggcgcaatctcggctcactgcaacctctgcctcctgggttcaagctattctcctgcctcagcctcctgagtagcttggactgcaggatcaccacacccagctactttttgtatttttagtggagacggggtttcaccatgttggccagggtggtctcaaactcctgacctcaagtgatcacttgcctaaatctcccaaagtgctgggattacaggcgtgagccactgcacccagtctggtttgactttcagtgacacttttacttcttttaagtgcataaagtaaaaaatactaagataaaggacgcaaattaattcctaattaacatatttatagtttggaaaaagtgctagaggtgcttgccagttcaatttaattccatgcccagaatgtggtttctgtttattgaaatgttcttagttttggtcatctgttactacttgctgttgtcttcacggggccctgactggccttggcataactaggctgctaggggaatagttcttagagagtcattttatgtattggattttattctgatttgttttctctctgaaagctggttgttatttgtttttttttttttttttcgatcttaggtggtggttgacacagcacagattgagaataaagaagcctatgccccccagatcagtttagaaggctctagaatcgtggttcaagtcccatccacatggtaacgtgcctcttactttcaccggagcctaagctctgactgacgtttgcacatctttgaaatgatggccttgttttgaacaatgcccatgctagctgacgcaacaagtcttgctgcatgtgcaggtttatgggcagcagtggtatgttagtggcatgtgtcatgattattggtctgtgatgaggaagccaagaggtctgaaaaatggtctcattgaccataatgtaactaaaatgttatatactcttggatcataatgagcagtattatctttgttactgagtctacagcatttaaacatagtatatcattttctctaagtcacccagtgttcactaaagcccagtagagaacatagaattccttctcctctgttccaactacaatcctgatgatcttgagctcatgttgtgacacacccagtgtctttacaaatcttgggacagtcatttttagatattatatttgtaacacttataatagataaaagattattcttaatttatttttttttaaaaaaagctcctacaaatcagaagaaaatgggcaagggacatgaacagctaagtcagaaaagaagacatatgatcaacaaatagattaagaaaatgtaatggccaagtgcggtgactcacacctgtaatcctagcactttgggaggccaaggcgggcagatcgcctgaggtcagaagtttgagaccagcctgcccaatgtggtgaaaccccatctctactaaaaatacaaaaactatccaggcatggtggtgggtgcctgtaattccagctaatcaggaagctgaggcacaagaattgcttgaacccaggaggcggaggttgcagagagctgagattgcactattgcactccagcctgggcaatagagcaaaactatctcaaaaaaaaaaaaaaagaaaaaagaaaatgtataacttcacctaaaaatcagagacaaagtaaagaaaccatatggggccaggtggggtggctcacacctgtaattccagcactttggaaggccgaggcggccagatctcctgaggtcaggagttccagaccagcctggccaacatggtgaaaccctgtctctactaaaagtacaaaaattagccgggcgtggtggcatgcacctataatcccagcttaaggcaggagaaccgcttgagcctgggagacagaggttgcagtgagccgagatcgtgccactgcactccagcctgggtgacagagcgagactccgtctccaagaaaaaaaaaaaaaccgttatgatgtcattttgcccagaatattgttaaattgttttagaataacaatactaaatatagtgacaatactagtttgagccagactgtgaaacaggcaaagaggttgttgagtagagactaaatacaacctttctggagggcaatttagtatattagaagcctaaaataagggatatgacctcaacaattccacagtttcacctctagaaatttatctttgtgatatgtattcacattcagctataaggatgagtatcatagctttattaataaacaggaaaaactaagcatatattggaaggtatttgctattaaaatggtaatctgcatgaatatttagctataagagaaaatatttaaatcatttaagtaggcagagatactaaggaacaaagaggtgctgttggtgcctatgtggactaaaatggtagttgggtaaggcatacaagttgtatttaaaccatttgttcttttttttcgagacagaatctcggtctgtcgcccaggctggagtgcagtggcgcaatctcggctcactgcagcctcttccgcctgggttccagtgattctcctgcctcagcttcctgggtagctgggattacaggcgcatgccactacgcccagctaatttttgtacttttagtagagacagggttttgccatgttggccaggctggtcttgaactcctgacctcaggtgatccacctgcttcggcctcccaaagtgctaggtttacaggcgtgagtcaccgcgcccggctcatttgttcttgaaatgtaagagtataatagtagattctgtcaaaagtgtttagagtctatgaatatatttaagtaaatgttggcagttcactttgtgtcctaaaacctcccttctataagtactctgccaccaaaaagttcttttatttttttaaattattattattattttttttttggtagagacaagatctcatgctgtcccccagactgcagtgcagtggtgtggtcatggcttactgtagccttgaactcctgggctcaagcaatcatcccaccctggcctcccaagtaggcgggactacaggcatgtgccatcatgcctggctaatttttaagttttttgtagagatggagtctcactatattagccaggatggtctgggactcctgggctcaagcgatccccctgccttggcctcccaaagtgctgggattgcaggcgtgagctactgtacctggcccaaaattttaagttaattgtagggtggcatactgtgtcctgaaattaatggtaatttatacacatattttcatttctatcaaacagtaaaccagaggctcactttctgtaagatttttgtgttactaaattctttttttttcttttgtagtcagtgttctgctgaaatgtgttcctgaatttttttttttttttttgagatagtttcgttcttgttgcccacactggagtgcaatggtgttgtctcggctcactgcaacctccacctcctgggttcaaatgattttcctgcctcagcttcctgagtagctgggattacaggcacctgcctgcatgcccagctaataacttttgtgtttttagtagagatgggtttcactatgttggccaggctggtctcaaactcctgacctcgggtaatccacccatcttggcctcccaaagtgctgggattacaggcgtgagccactgcacccaaccctgaattcttaaatttttccaattcaggctgtcattggaaaatgttaaaacttaatcagaattctcattttgaagagtttgaacttttggatagttgggtgaatataaacagtcagtgcaaaaatggctaacacttgagtttgttttgaaaactctccctgtggggttgatttcatttgtaactcattgcacccccgcaaaaaacaccttgtagactgtgatttcttgtagaggtgccctctgctgggtgcttttggtaattttgcaaaattttagttctgtttttttttttttttttcaaattacaaaatactgtatgtgcttgttgggaagaacacaaacagaaatgattgctttactccacctggagaaaaaggatattgctatccatccatgctttgtttcaccaaatatttactgaacacttactgtgtaccagacactgttctgggctctgggaatttaattatgagcaagacacacagggtccctgcccctcataaaccaacttgagaatagagaagggggagacagctgttaagtataagagatgagttcagacacaggcaggcgtatgatggaaatgagaggagagtgccattatatgatagagaataagtaggatagagattcgggggagacttttagacgagtcagtctggaagagggtctgaggatgtgacattggatttgagaggagcctgtcatgcagagagccgatggggaacacacttcaggcagaaagaatgccagtgcagaggcctcaggagtgacccagcatggaaggagatgtgctaggtggtgatgaggatgggaagttgtagacgtcaagacttgcagggcccttgaaggaattgggtttttatctaagaacaggtagagggttttaggcaagtcttggtgatttgtcaacagaatgggtttagccacttaagggcattttattgatcagctcaaggctgatgaataaaataaaaatgccagtttgttgattgttgatttttcagaaagattaattatcatcaccaggagctgtagtactcttttctacatggccaacaaatgctctcctagtgggcaaacatgtgacaagccaagtcacaaccagacttggcttgggaacaagagcaaatgtgtcctgattatcagtgattccagatggagagaattgggtgcactgaaccttgggcaggctcagctgccaagattctctctgaggagtccaaggtctagctgggcactagcagagcttgcgttgttgttcaccctttccaggcttctgagcctggccggctctcatttcattctctgatatatttcttcccaagtcaaagtcatgttagggagtactgctacctccttgagtgactttgtaagtgttgagttcaccatttagcttccagagtgcccaggatctggcagacatcatcttcctagtagacctatgctgctcagactgttttccctctcagaaaagggctcttggccagaccaagtggctcacacccgtaatcctagcactttgggaggctgaggcaggaggatcacctgagctcaggagtttaggaccagcctgggcaacatagcgagaccccatctctacaaaaaaattaaaacattagccaggtgcggtggcacacgcctgtagttccagctacttaggaggctgacatgggaagatcgcttgagcccaggaggtcgaggataacagtgagctttgatcacaccactgcactccagccttgaggatagagtaggactctgtctcgaaaaaaggttggggggctcttggtgtaggtaccctgaatggacggtggagacccaaatgatgagaagcagttggccataccaaaatctcaggaaagagaaattcgggcaaaggcagcagcaagagcaaaggtcctgaggtgtggacaaacccatccagggaggaagagaaggcctcacagctgggacaaggttgaggggctgggcacagagggctttgagggctgtggtgagggtttagattttatttcaatcacgatgatatcccattgaagagttttaagcaggggagtgatgtgctctgattggcactacaggaagctcactctggcccctatatgaaggatgggctttggaggtacaggagtagagaaaaagaggccaggtgagagcttggtcctgagacccaggagtggtggtttcctgaagcagggggttcataaacaaggtggcgagaagtgcttagattctggatgtgttttataagaagagctgtcaggattcactgatggattgcatgcaagatgtgagggaactagagagggtgtgtaagttttggggtagacagttgtgttgttcacttattggagaagtcggcaggaatcagagtgtctgagctagcacagaccgcacaggttaagggctcagccccacaaggctactccccacttcagatgccatccacaagtcccaggttgtcacccgacttctaaccaatcggctataagttgggggttcccaaaacctccaggtttgatattttgctataatggctcacagaactcagtaaaacatttaattatatttaaggtttattataaaggatattatagcagatacagattaacagccaggtgaagaggtgcatagcgtgaagtgtttgggatggggctccaagcctccatgcccttgccagctatgccctgtgcccagcaccttagtgtgttcaccagcgtggaagctctcagaacccgatggtctgatgatttttatggaggcttcatcatataagcaagtcatcttattagaacaaaagacactatcacctaggaaatctcaagggttttaggagctctgtatcaggaactggaggcagagaccaaatatatattctgatatcatgagacctcagacctttttgcttcctactcctcttgtggggcagtgagttccaggatcagccctgttgttctctccatgttcttacagttactgaatttttgctgggcgccagaggtacataaaagttgtagccttttctatgagacctgcttgagacacctttgcagagaaatgcagccaagactaatgcagcctaatctatgcctaggtgcctgaaagaagaccctgctaccatgtccctgctgcagagaagccttgatcctgagaagaccctgggtctagtggacgtgctctacacagctgtgctggacctaaaccgctggagggctggaaggttggtgtctgtggtttgcattagatgcataccgagggacagtgtgactatgcacagtttcatgtgtgcttgtgtcattgatagtatacggtattgtaaagaaggcagtaaggactttttagtaacttttattttcagaataatttaaaacctgcagcaaagtggcaagaataatacaaagaactgctccatgccctgtaccagattcccctatttgctaacttttttgccttcctttattttgtcatttgagaggaagtccatcaagaggacttttaactcaactcatattctccttatgaattaagaacagagaaatgtttagaaaatttgcttatgtcttttagaattttttttctttttcaatcagttctctcaggttgaacttgagaaatgtgtatacatctggtagtggccttaaacatctagccatggcccctctccctttttcttttcttttcttttcttttcttttcttttctgtcttggtctttgtctttggtcttgtcatcttgtctttttaggatctggctctgttgcccagccaggctggagtgtagtggtacaatctcagctcactgcaatattgctctccatccatgctatccatcccatccatcccccagctcctgggctcaagtcatcctcctacctcagccttccgagtagctgggattacaggtgtacgcccagctaatttttgtatttttcatgaagatggggtttcgctgtgttggccaggctggtatcaaactcctgacctcaagtgcctgcctcggcctcccaaagtgctgggattacaggcgtgagccaccatgcccaaccttttctccctttcttaactcatgagtacacaaaggccagaatagtgaagtgacttttccagggtcacacagccttcacctgcctcagctcctgccccatgccctttcgctctttagggctccattttagtatgggaaaaatgtgctcaggaaactttgaaagtcacagccatctgttgggacaacgttggcacatagtatccctgcatccccccaccacctccctctgctttgtggagttgtccattgtccctctgctgcatttgcgtggctgtagcccctgtcctccaggcacaaatctagcttctgcaagttgcatccccacatctagccatgctttcccctcctgtgccaccattagaggatttcactgaatcacactcctcaggccagaatcctagcagaacttccagtcctgcgttagacactgtagatttcatactctccaaacccctgggtgttcatttatatataaaataagtgaacccgataccaacctgagaggtttttcttgctctcaacgccattcttaaatacaaagaggtccattttattattttatatatttgtcttttttttttttaaacaaatttctgtttaaatagggagcaagctttaccctgcatacagatccagctgcaaagggagatctgtgattttggcaaccaggctgacctgccttctggaaatggaaacaaatcttcaggtggcctgcagaagacattctccaaactgacatcccggttcaccaagaaagcttcatgtaccagctccagcagcagcacaaattattccatccaaaataccccttccaaaaacatcttcatagctggatgttccgaagagaaggccaaaatgcctggcaatattgatacaaggttacaaagcattttgaacattggtaatttccccaggactacagacccttcacagtcagctcagaattccagtaatacagtggccaatggctttctcatggagaggcgtgagaacttcctgcatggagatgacggcaaggatgagaagggtatgaacttaccaactgatcaggaaatgcaagaggtgatagattttctctcgggctttaacatgggccagtcacatcagggctctccgttggtgacaaggcataattctgctgccacagccatggtgactgagcagaaggcaggagccatgcaaccacagcagccgtcactgcctgtgccccctccaccacgggcaccccaggctggggcacacacacctctgacaccccagccgggactggcacctcagcagcagtccccaaagcagcaacaacctcaagtccaatactaccaacacctactccagcccattggaccgcagcagcccccgccccagcctcgggcacctgggaaatgggtacatggctcatcccagcagccagcgcaggctgttggagcaggtctgtctcctcttggtcagtggcctggcatatctgatctcagttctgacttgtacagcttgggtctggtgagcagctatatggataatgtgatgtcagaggttctgggacagaagccgcagggacctagaaataacacctggcccaaccgtgaccaaagtgatggagtctttggaatgctgggagagattctgccttttgatcctgcaggtatgtgaggcctcccatccctcgcccagtgtcaacagcaaatgcaactgccgaggtcttcccagggcctgtctgctgcagccttacttgtgaaggtgaaatcatttaatccccctttacgaccctttctcactgtggaggcaagtatggggcagatctaccaagatgggaaacagtggtgagaaaggggctgagaacatgagtggactatttttcttactttatagagaacagaactgaggctaagagaggttacttgaacagctcaaagtcccatagttcaagtaggctccagtctaggcctgcctactcccggcagccaaggtcagcagccctttgtggggtgcttttttcctgattatataacctgttctttgcgatgctttttttttttgcctaaactctaggacctatgacaggtgacagacaccctcctgccttcatagaatacagcttctcctgggctagacaatgaaaataccaccagagtcatcttaaaaaattagagaaggaatttacaaacaagaacaaactaggaggaggaattaagggggaaaagccaaaaataagtaaattagaaagaaaaatagagtagaaattgcaaataactctaaaggatctttggaagaccaataaaatgtataagccaatttattctaagcttgattaagggagaacaaagagaaacaaaattaggaaatagaaaggatacattaaaagcgctttagtggctcatgcctgtaatcccagtactttgagaggctaaggctggaggatcacttgaggccaggagttcgagaccagcctggtcaacatcacaaaaccctcatctctactaaaaattaaacaaaattagctgggtgtggtggtgcttaggaagctgaggcggtaggatcccttgaccccaggattttgaggctgcagtgagctatgatcatgccactacaccccagcctggctgacagagagaaaccctgtctcaaaaaaaagccactttaagacagtaccatctaagacttaatagcaatacatttggaaattcagcagaaaatggattctttcctagcaaaataggcattacaaaattataccaagaagtggaaaacctggccaggcatgatgtctcatgcctgtaatttccagcactttggaaggctgaggtaggcagattgcctgaggccaggagttcaagaccagtttggccaacatagtgaaacccccatctctacaaaaaataaaaaattagctgggtgtggtggcacatgcctgtagtcccagctccttgggaggctgaggtgggaagatcgcttgagctcaggaggttgaggctgcagtgagccatgatcacaccacagcagcccagcctgggcaacaaagtaagactctgtctctaaaaaataagtaaatacataaaaaataaaaaagactatctactaaaagctaatagcaaatagtgccttatataatgaaacaaaaatcatttcagttaatatcaggaatcagacaagggcgactgttatcacctgtagcatgtaactttgtcttggacttcacagcaaatgcagcaagacaaaaagcaataaaataagtggtctaagctttggaaaatgataaattaagcagcacatctttttgctgataatagaattgaaccccccccacaaaaaaaaccatctaaaattagtaagagaatttggtaacataggtacatgcaaacttttttctctaatttagcaaaaggcatacacagaagtagaaaatgtatttcattcacaggggagtactgtgaaatgttacaaataagtatagcaaatacttgtacaagtaaatcaccaccataagaggacactccaggccgggcgctgtggctcacgcctgtaatcccagcactttgggaggccgaggcgggcggatcacgaggtcaggagatcgagaccatcccggctaaaacggtgaaaccccgtctctactaaaaatacaaaaaaattagccgggcgtagtggcgggcgcctgtagtcccagctacttgggaggctgaggcaggagaatggcgtgaacccgggaggcggagcttgcagtgagccgagatcccgccactgcactccagcctgggcgacagagcgagactccgtctcaaaaaaaaaaaaaaaagaggacactccttgctgaaacacccagcatttgttacaggagggaagttaatgctggggttaacactcctttctctttttttttgagacagagtctcacgttgttgcccaggctggagcgcagtggcgcgatccccacttacttgcaacctctgcctcctgggctcaaatgattctcctgcctcagcttcctgagtagctgggactacaggtgcctgccaccacacccagctaatttttttttttttttatacggagtctcgctctaccgccccgaggctggagtgcagtggcgcgatctcggctcaccgcaagctccgcctcccgagttcacgccattctcctgcctcagcctcctgagtagctaggactacaggcgcacgctaccatgcccaactaattttttgtatttttcatagagacggggtttcactgtgttaggcaggatggtctctatctcctgacctcgtgatccgcccacctcggcctcccaaagtgctgggattacaggcatgagccaccgcgcccatagagatggggttttgccatgttggccaggctggtcttgacctcctgacctcaggtgatccacccacctcagcctcctaaagtgctgggattacaggcatgagccactgcatctgaccattgctcatgtcttctgaaaattcttcatgccgctgctcttgctgttttgtgcttgctccccttgggtggatggatgtaggaaacccttgtgcctgcaaccctgggccacaagaagggtaaacacctccatcctgctaagaaacagcaagcccactggctgccacccactggtgtgggcacagtgcgttttctcagttgatcatagatggtgtgtacattttttgactgtcatataactaaatccagagtataaacagtatttgtcagaattgtgtcatatttgaggccgggtgcagtggctcatgcctgtagtctcagcactttgagaggctgaggccagcggattgcttgaggccaggagttcaagaccagcctggccaacatggcgaaaccccgtctctaccaaaaatacaaaaaaattagccaggtgtggtggcacacacctgtagtcccaaccacttgggaggctgaggcacgagaattacttgaacccaggaggcagaggttgcagtgagctgagatcacgccactgcactccggcttggataacagagtgagactttgtctaaaaaaagatttatttttaataaatgaataagaatgttatcatatttgacctctgagtcctggatacctcttctgtctgtagactacaaatcctactctttcccttctgggtgttcctttctgcacctgaagtccatggtgtagttttctacagaccttgccccgagggcataagatctgcatagcccttgatgcagattaaggaggggcacccctctggacagaatcagagggcgccatctagtggccccgtctagataggcaaaatcagtgcgggatggggaacgggagacaggccagcatgactgaaatcatcttgtgacagtgccctaaggataagttgataatgggattgtgccctagtatcttccctaattttaagctaaaaaatgcattgctgagtcacatttgatttatgatgcatggatgctttcctgccatatgttttttttgacactttctgtaaacgccatctgtgcttttctcccatttgtactgccctgtatatccccgttcagcattgccagtgtttccagccacctcttaaagcattctgaagtttcattttattctttgccacacttaagatgttcagatggaatgagcaaatctcctgtcaatagccaggaaaatactagatcaaactttagcttaagtgggatcagcatataacctctatctggctgaccccaatgctttgatgctttgttaacgttcaggttatcagttggccaaagtcatcatctgattttcgaagttgttagctaatgactctaggctacatacagagcaccaagacaatggactttttttgagttggagttttgctcttgtcacccaggccggagtgcaatagcgcgatcttggctccctgcaacctccgcctcccaggttcaagtgattctcctgtctcagcctcctgagtagcttggattacaggtgcctgccactacgtccagctaatttttggtatttttagtagagacggggtttcaccatgttggcctggctggtctcgaactcctgacctcaggtaatccacctgccttggcctcccaaagtgctgggattacaggtgtgagccaccaagcccagcccagttttgttttgttttgtttttaaagacagggtctagctctgtctctcaggctggagtgcagtggcgcaatcttggctcactgcaacctccacttcctgggcccaagtgatccccccacctcagcctcccaagtagctgtgactacgggtgcacaccaccacacccaactaattttttttttttttttgagacagagtctcactctttcgcccagactggagtgcagtggcacgatctcagctcactgcgacctctgccgcctgggttcaagtgattgtcctgcctcagcttcccgagtagctgggattacaggcgcctgccaccgaacccagctaatttttgtatttttagtagtggtgacagggtttcaccatcttggtcagactggtcttgaactcttgacctcgtgatccacccacctcagcctcccaaagtgctgggattacaggcgtgagccaccgcgcctggcccacacccagctaatttttgtagagatgaggttttgccgtgttggccaggctagtctcgaacttctgggctcaagcgatctgcccacctcaggctcccaaaatgctaggattacaggagtgagccactgtgcctggctgatgctggaaattttttaagtaattagtatttgtctttaaaatctagtcgtagggaaatcaaaccatttttctctctttttgtttctttcacacttagcctgcctctatcctaggcatagcccttcatgacagccctggcacacaccatgcctcagccctaggtgcggcaagtcccatctccccacagcagggtgctgggcacagcctacagcccacgctgtggggcacaagcctggcagctcctcactgcctttcattgcatgtgtgaccagcacgttagcaaagcgtagggaaggaccaagaggccagtttgtccccaaacccggtttattcctttgtcccaatgcagtgggctcagacccagagtttgcacgctatgtggcaggagtgagccaggcgatgcagcagaagcggcaggcccagcacggtcgccggccaggcaacccccggggcaactggccgcctatggatgacgcgcatcggacctggcccttccccgagttcttcacagaagggtgagtgctgggtacttcagggaatctgagcttgagacccaggtgtcccccgaggggcctgtgagaagagaggctccttgcctgtgtgcattcttttcaggcagttcaattccaagcccccatgtgagagagtgacatgggatgaaatctttaggggtcagagtcatgtggctgactgttagatgccaagtagtgtgatgtatccctgtgaacgtgccattggtatacattcatgattttcaaaacagactcttcagccctagacaaggctcttacatgatggtgcttgtgaggtgaaggcatgtttcacacggcctttatactgaactgagtgtggctgcgaagcccacgtgatttatggaacgctgtcattatagcctatgaaaagcaaaagtgtacaattgagattctagtatattgagagaattgcaaatttttattgtaaagacaactggggatttttttatatcccatattgctacatggttaataaatctggatgactaaagaccagctcaactttttgttttttcttatttttaaatttttttttttacttaaaaattttttttctttcaacttttaagttcaggggtacatgtgcaggatgtgcaggtttgttgcaaaggttaatgtgtgccatggtggtttgctgcacagatcatcccgtcacctaggtattaagcccagcatccattagctattcttccccatgctctccctcccttgctttttctaaaacaaatttcatatacaaaccataggcttcttagaggaataaagggaattgatgaatatgtattacttttgaaataaggcaaaggaggaaaacctcacgttttaagaagggagagacaagagaccactatttggttatgggatgaatgcagggtaaggactgccctttcagggtggggtggcgggtggtggggctgcaggaggccctggcccagcttctctctctggctttcagggatggcctgcacggtggctggtcgggtgctcagggagactctgccagctcgagtgatgagacatcctcagccaacggggacagcttgttctccatgttttcagggcctgacctcgttgctgctgtcaagcagagaaggtatgaagggatttctaaaccaaggtggggagagaagggcatgtgaatgcaacccatggctcactccctgggaaagccaggagcccagtcacctccagtctccctgtgtgagaggaggggctcttccagcaatgcctggctgaagcctctgaagagcacctgcaggaggcggtttccacaaggaagagccggcctcatcttgtgcagatcaatttgggagacggggtggccggtgctggtctgtgccttgcaggaggcacccatttctgtgggaagagcaggcctttggttgcgagttctaatctggactcaccaacaggctctgcaaccctagacaaggggctggccctcaattaccctccatctctttattaaagatggataaaatgacctctgaatggcgtttcaaagttgggaaaagtagtaattagctttcaaaagtagtcacaaaaattaaaatgggctctgaactgagaggagagcttggttagaaataagtagagaaactgctgtggatatgagaaagcaaggtcagggtggcagactaaggaccatgggcaggagtagagggcacgcagggctcccaggcactcgaagccatgctgtagagcagagtgggaggccgggttacttggtccctgctggacaggccaggctctgtcagataggcagtggggagcgggtaggtgaagacagaatggtacttgcacagaatagtagtggggtggggggtggcattgaccaatcacgagcacacattcagatgctttctgtccacacttgtagtcccagctactcgggaggctgaggtgggaggatcacttgagcctgggaagttgaggctacagtgagctgtgtttgtgccactgcactctagcctgggcaacagagttagaccctgtctcaaaaatcaaacaaaaaatcatgtcaggttaggctaggtgctctgaaggaaaataaagcagggtatgagggtagtaaatgcagagaacaggtggatgttctatttccagcacttagtcaatgaggcttctgatgagcagagagctgaacaaagtgcggcagcaactggtggggaatcggcagtggggtgtgggtgaggtaggaagagtcaaggatgacacgcaagttttctgcctgagtttctgtgaagggcgccatgaactgaggtgctaagcctgcaggaggagcaagtttgaaccgggggtggagtttgagacttttctttcagacatatgactgattcgacttctaagaagtcacatctggcaccatctctgcagagactgttgtctgcatgcaggagtgctggctctgatctggccacatcctgcctttttcattcaaccttgtaacagactttcatgtgattagtaaaacgaatgggctttaagtcacatatccttagtgcttggaaacagtatctctctctttttttgtttttttgagacggagtctcgctctgttgcccaggctggagtgcagtggcgcggtcttagctcactgcaagctccgccttccgggttcacgccattctcctgcctcagcctcccaagtagctgggactacaggcgcccaccaccatgcccggctaattttttgtatttttagtagagacagggtttcaccatgttagccaggatggtcttgatctcctgacctcgtgatccacctacctcggcctcccaaagtgttgggattaaaggcgtgagccaccgcacccggccggaaacagtatctcttaaataaattaacaaaaagccggccggactcggtggctcacacctgcaatcccagtactttgggaggcttaggcgggcagatcacctgaggtcaggagttcgagatcagcctggccaacatggtgaaaccccatctctactaaaaatacaaaaattagctgggcatggtggcacgcacctgtaatcccagctactcgggacgctgaggcacaagaattgcttgaacctgggatgcagagtttgcaatgagctgagatcatgccactgcactccagcctgggaaacagtgagactcagtctcaaaaaaaaaaaaaaaaataaaataataataataataataataaagccaaagaaggtggactcagcagctgagtaaaccagtgcctgtctttgcctgccacctccacccccagctcctccacctgcactggcagtgcaggagcgccgtcattcactgctggctccccttagccgcctttatgccattgacccaggcaggcctcctcccctcctagaaccagggcctggagatgctggagcctagcactagtgtgtaccctacaggtgggctgggcaggaagccaagcaatcactgccctgagctcttggttcttgcaggaaacacagcagtggagagcaagacaccagcacgctgccctcaccacctctcctcaccacggtggaggatgtgaaccaggtattcaggcaggctctgtgggcacagacttgggctagcttccacagctgcagttttcagagggcctcaaagtaatgagggatcttctttgtggtgattaattttgtgtaaatgattagccacctcagctgactcagagccacaggaagctctacggctgtgctgtccagtgtgatagccattcaccacatgtggctatgtaaatttaaatacaaataaaaattcaggccgggtgtggtggctgatgcctgtaatcccagtgctttgggaggccaaggcagaaggatggcttgaggccaggagttcttgaccagcccaggtaatatagacactgtctctgcaaaaaaattaaaagatcagctaggcatggtggcacatgcctgtagtcctagctgcccaggaggctgaggcaggaggatggcttgaacccaggaatttgagattacagtaagctatgattgcaccattgcactccagcctgggtgacagagcgagactgcctctaaaatactttttaaaaacaatcagccgggcgcagtggcgacgcctgtaatcccagcactttgggaggccaaggcgggtggatcacgaacgaggtcaggagatcgagactatcctggctaacacggtgaaatcccatctctactaaaaatacaaaaattagccaggcatggtggcatgcgcttgtaatccgagctactcagaaggctgagacaggagaatcgcttgaaccccggaggcagaggttgcagtgagccgagatcgtaccactgcactccagcctgggcgagagacagactgcatctcaaaaaaaaaaaaaaaaagttcctttcctcagtttgcactagtcacatgtggcgagtggctaccatactagaccgtataggcacagaacatggctatcattgcaagaagttctgttggacaggggtgtgggagtgagtggggctctcacccggcttcctaggagggaataagggccaggcatctggggaggtgggaaatgatgatacattgcccgaaatgccactaagaactctcttttgtttctcaggataacaaaaccaaaacgtggccacccaaagcaccctggcagcacccttccccgcttcccagcacgctgcccagccccagcgcaccactctatgcagtcaccagccctggcagccagtggaacgacaccatgcagatgctgcagtccccagtgtgggccgcaaccaacgactgcagtgccgctgccttctcctatgtgcagaccccaccccagcccccacccccaccagcacacaaggcagcacccaagggcttcaaggccttccctgggaagggtgagcgcaggccagcctatctgccccagtactgaccccaggccagccagcctgcctgcctgcctgcctgcccgcccagagctgtggggatgagtgtccccaccccagggccacttagctgacaccagcccctcagaggaccagtgcgccccatcccagggagggttccttggggacaagggtggttggcagctccaagcctttaaacctggcttctgaaacgatggcatcagagccctggagagccagctggagacacaggcgtctggccttcaggggcttgctagggaacctgcatgcctagtaagcgccacaggtgactctgatgcaggcgccacagccacacttgaagaaacacagctcttgggtttttagtcctgctgtgtgttgggaagacatcaggcctgaaagctgagggcataactgaccattttttggaaaccctctcctccctcctccacaccttgagtgatgaccacaccaatcactgtattttatagctttttttttcatgtaggtttttagttaaaacatctcctgcctaaaatgcattgaatattttaagataacagatatactggctggaggtttgtttaacactatctatatttaagcttatacaaaatgggcaaaatatagaatatttgtgattggaagcagtcacctggggtttctgggggtggacagttcctcgccacccagcagcaccctgggactgcggcctttcccagctttattgaagcagaatggtggaacttgtgccggaggtacactgctgaaggtgcgtggcggtggaccagccagctgctgtccatgtgcagagcaaggctgcacctgctgcccttcgatccttccacacatggccaggacactgccacaatcctcggggtgtggtcaaggggcactcagagacacctgcactagaaattgcattgacattgtgagctggctcagaagacaaaccaattaagatgtagatagaaattaatttaaggtcttttcttaaaaaaaaaatccacctcattttcagttaacatgtgccattaaatagataacatcctgtggatttagggatattttccagccagaatggatccagaagaattgaatggtgcttaaattgagaaataataataaatatatctatatagaatagacatatcccactgtatattaattgaggttacagaaagttctttatataaaacttatttaaatttttcatatttcatctttgaaaaagtctgagaaaaatccataatattttctggtatgaaagtttgacagtattaatattttttttatattttcttaaatcattaaaccattttaatatatgttaactactaataaatggtttattctttctaactccatataagcttttccagcaaagattgtaataacacatttatgttctcgtttttctacagatataagtaaatttatatataaaaataccaaaaagaggctgggcgtggtggctcacgcctgtaatcccagcactttgggaggccgaggcaggtggatcacctaaggtcaggagttcgagaccagcctggccaatatggtgaaaccccatctctactaaaaatacaaaaattagccgggtgtggtggcgtgcgcctgtagtcccagctactcgggaggctgaagcagaagaatcgcttgaacccgggaggcggaggttacagtgagctgagattgtgccactgcactccagcctgggtgacagagtgagattccgtctcaacaagaaaaaaaaaaaagaatatatatatatgtatgtatgtatgtatgtaaacacacacactaatttgagaggacccgtagggtgtctgagcccagccacctgagtttttagtactgtgttgtcaggctcttcccaggcctcaggtgttgtcttttgtgctgtgtggggatgcattgctgcctgtatttatgatcttttgccgtggttctgagcattcacctcaccatgtttacaaagaactgttttgtatatagacattttcaggcacgtgctttgcaccaaccctgcgtggctcttgtctgtgttagctgtcacggtgtgcacactaatctctgttaaagttgtctatggctgttctacttgtaagatagttttctatttccttcagtaatgtgtccacagtaccctgtatttcgagttccattatactgaagtactcatgttttaatagtgcctctccaaaggcctcaccttggacagaggtcaatccttgatgctccagcacaggtgacgtcactaattgtcactttccagtttgtttttctctattaaggaagacattttctaattgcatctccatgggctgtgagactgtgtgaagccgtttgtgtggtctccatgtaggtgctgtgttcccggcaccgccttgctctgaacactggtaattccaggtgctgcgcttggcagaggggtctcgccaaagcgcatgtgtgtgcatgtgtgaacgtgtgtgtcctttgcatggttgggcgtgggtgccttgctagggcatcagcaggacattgtgtgtatagttacaatgcttccaaactggaactctacattttgtatcttttaaagctcctataagtaaaataactattggctttattaaaaatatacatttaataatactttgtatccttgtttaaaatgaactgcagaggacattatgtcaaaagccctgcctgactcattgctttgaaaagctgcatactgagttggtttttaggtcagcctgtcctctgattctagcaaggggaagaccacttgggatattacggtgagctgaagtggatgggcaggagggagaacaagcagctacgcctcccctattggcttccctaaggcccaagctggtttaggcccctgtgcagggggagccagtgcagtagtgaaggagacgtcctctgcaagggtgcaagctctctgggttggggtctaccaacacccatgttccaccaaatgtggatgctgtgacttgcccagccagcttgtccaatgacgagacccaagaatgagggcttgttttaccctcttcccaaaccagggacccaatctatggcagagatactgtgccttacagggataagaaggacctgtctctgccggccgcagtggctcacacctgtaatcccagaactgtaggtggctgaggcaggtggaccacaaggccgggagatcgagaccatcctggccaacatggtgaaaccccatctctactaagaatacaaaaattagtcgggcatggtggcgtgtgcctgtaatcccagctactcaggaggcttaggcagaagaatcgcttgaaccaggaagtcagaggttgcagtgagccgagatcgcaccactgcactccagcctggcgacagaacgatggggctgtctccaaaaaaaaaaaaaagccaggcactgtggctcacgcctataatcccaccactttgagaggctgagacagtagatcatgaggtcaggagttcaagaccagcctgcccaacatggcgaaaccccatctctactaaaaatacaaaaaattaggtggtatggtcgcaggtacctgtaatcccagctgcttggaaggctgaggcaggagaactgcttgcacccgggaggcagaggttgcagtgagccaagactgctccactgcactccagcctgggcaacagagtgagactctgtctcaaaaaagaaaaagaaaaaaagaaaaaaacaaaaacaggacctgtctcactggatgatgccatcgtgttaagcagaagaaagatagtatcatgagacccacaaatggagggcaggtcacaggagcatttcagctcattttcatttacagaaagacagcacctcagtggaaccttttttgacgacctgaagaaaatggagtaatgtgggcattaatatataagctgctggtgtaggaaccactcttctttctgccaaggtgccctgaagttgagcatggggaccaagtcccagagccttccaaatgcacctcaggacaaagttgctcggtaacggccatgttgcctgagagtgctcaagaatacactggaagttcatattaaaaagctagcaggggctgggtgtgctggctcacgcctgtaatcccagcaatttgggaggctgacctgggaggattgcttgaggccaggagttcaagaccagcctgggcaacatagtgagaccccatctctttaaaaaagcccatattttattccagagtgttcccatttaacacaagcacccagttctcttgactagttctgattcacagcagtgctggaggccagagggcagaagtcccgcagctctggctgtgtgcaaatgagtggggagggaagctgagcagatgctacacctgagctactactgcaagggcttcacaggccttggcccatctgagaaatgggggaggatgcgcaggcatcttgaggtacttgggaggcttgtgaccttcctctcccacctgggggctccttggatagggggcttccagtttggaggctgagatgctgcatgccaaccatgcggctgtgaggggatggccttttgtgcactgtgtggccactgctgtgacctgcctcctgttgtggagacaggaaataaaccttcccaatgatcagcttctctactgcccaaaagcatgtatgtggacagcatgactggctacctcccagcgacaggtacccaggagtctgaggcacctccaagggtagactctggaaataacacatgcacctagccttacagcacaggggtgagctcctgggcccaggcctgtgtgtgtcagtgaggggactggatgtggcttgtactggaatattgacttggagatgtgggcctaggtgagggagaaggattgtttcaggcgtgtcacattcatttcaacattcacgaatgtcatataagggctaggcccttgctaggagccaggactgcaaagatacagtccctgcctttaaaactcagtattttaggggagacaacccatctttcccatccttgataagagaaccaccatccaccagcaacccagttgctcaggctgaaatcccagaagatattcttcgttcttttatttcctcattcaactaatcagcaagtcctataagtgtattcccaagcacactcaaattccaccatgttctggccaggcgcggtggctcacgcctgtaatcccagcactttgggaagctgaggcgggcggatcacccgcggtcaggagttcgagactagcctgaccaacatggtgaaaacccatctctactaaaaaatacaaaaattagctgggcatggtggcaggtgcctataatcccagagaatcgcttgaacctgggaggcggaagttgcagtgagttgagatctcaccattgcactccaccctgggggacagagcaagactccgtctcaaaaacaaaaaaattccaccatgttcttacatctccactgccatctacctggacttcacctggctcctgcctctccccccacagcctcagggtttcccatgcaccctcccctacttccaagtagccttgccgtgtgtcctccaacttgcctgttgctcccaaggctgcttgggcctctccatcggttttctggggtcagagcccatcttccagcctgtcttcgtttctcatgatagcactcagcactcttctggaattttgtgtttgcatttgtgtctcactggaatgaaggccccatgagagcaaggagcgagtcttgttcatggccacatgtgcaaggtgcaggacagctcctgtgaccaccacagtgcaacttgagacagatgaaaggacgagttgctggggccagaacttacgaattctaatactgagcaaaaagacagaactagaggccgggtgcggtggctcacgcctgtaatcccagcactgtgggaggatcacttgagcccaggagttcaaggctgcagtgagtcgagatcttgacactgcactccagcctgggtaatatagcgagactgtctctaaaaacgaaaaacaaaaacaaccagacgaaaacattctcgcgttgggctaaaagaatactattaaatacatcatctgggctgttccaggactgggaggggattagcactacggtggagctgcggataggcccaagcaggcctcaaataaatgtaaagctttttattctcgtggaaacagctatgtacaatggggaaaatgtttttaagcatctagcaaaggattcacggggctctggtaatgaagccccgaaacgacaagactggatcgcgcagggtagggccaacaccagggacaaacccccggcctcttgggggcgcggtgagtaggtggcctctccaagcaccactcccgatgtgcgcatgagcgcagccgcccctacgcagcgcgtgcgcacgtgcactcaccacgtccatcccagacgtgcggacccgggtgtctgcaaggttcagtctccacaccccagcgcccgaccctgcgcggggacatgcgcacaagcgcgcgtcctgaccacccggacgtgctggcccacacgcacacgcgtgcgcattacccccgccccatccgcgcctgcgctcaaccccgcctacacctgctccgtggcctccccggaggcgatgagccaaccccggtagctccagaggcgtggtcccctcgccttcgccggtcaacatgactcagcatcctcggtgggctcgcctcctcccccggaacagctgtctaaaatccatgggcgtggaaacgccacgccacgccccgctcccgacttcttcagctcaggccccagaactgaccaccccaccagtcctctgccccagtccctctgccttcactcccatggccacctgtgctccagggcctgcctgacccctgtccagcggccctgaagtaaggtctgtgatgtctaaatgccgatacctcagtttccccatctttagaacggggctcttgtttggaactgtgcccgccacagcctgcagtaagtgctagcttcatcaatactcagtggcagtcaattgcttttccagggctgccttatgcttgaaattaaatctttgctatccagagttaggactgtccccggacttcctaacttgcctctgctgtcaggtgtaccctctggtccgctcctctctcagggccacatcatcttgctgggggcacgtgaaggtgtccggctctgcagcatgttctcttggaatttctgggctaggtttcctttcgattctccttggtcagtccctggcctgggggcatgacccctcccagcttcactaccccccaggatcctggggattctgagccctaagctctgcgatcggcaggacttggctcagcatatggtagtgattgtactgatggtgatagacaacagaatataaaatgaccttatggccaggcacagtgacgcatacctgtaatcccaacagtttgggaggctgaggcaggaagatctcttgaagccaggaatttgagaccagcctgggcaacacagtgcaactcagtctctacaaataataataataagaaaattagccgggacggggtggtcatgcctgtagttctagctactcaggagaccgaggtgagagaatcgcttgagcccagagttcaaggctgcagtgagctatggtcatgccaccgcactccagcctgggtgacagagcgagacactgtttcaactaataagacataactgggatgatgaggagtggagaaagggattgcctgctcctccactttccctccacctttttcctaggactgaagaggaactggcaggagcacaggtctcaggaaggaaccaggcagcctgggttgattctctagttaagagcagagtggcttgtttcatatttctttctttctatttttttggagacagggtgtcactctgtgacccaggccggagtgcagtggcatgatcttggctcgctgcaacctctgccacccgggttcaagtgattctcctgcctcagcctccccagtaactgggattacaggtgtccgccaccacgcctggctaatttttgtaattttagtagagacagggtttcaccatggtggccagactggtctcaaactcctggcttcaagtgatccacctgcctcggcctcccaaagtgttgggattacaggtgtgagtcactgcacccggccttgtttcacatttctttctttcctttttttttgagacagagtctcgctctgtcgcccaggctggagtgcagtggcatgattcagctcactgtaagctctgcctcctgggttcactccattctcttgcctcagcctctcaagtagctgggattacaggtgcccgccaccacgtccagctaatttttttgtatttttagtagagacgggggtttcaccatgttgctcaggctggtctcgaactcctgaactcgtgatccacccacctcagcctccaaaagtactgggattacaggcgtgagccaccgtgcccggcctcatttcacatttcttaacctctctgttaaatggggaggacaacagggtatccttcataggactgccatgagggatacatggaaaggatttagcatggagctgtgcacgtagtaaacctggctggagtagtggccgtgttggtagttttgtagtatgatgatgaatggctttggattagtactttctaatccaaaatggctttggattagacttttcttcttacttttctgtgctttctccctgtagccactgtgatttatggcccaccagataggaacctagtttcctgctaacatagaaaatccaggctgggcgcggtgttgcatgcctgtaatcccagcactttgggaagccgaggtgggtggattaccttaggtcaggagttcgagactaccctggccaacatggtgaaaccccatctctactaaaaatacaaaaattaggccgggtgcagtggctcacgcctgtaatcccagcactttgggaggctgaggcagacggatcacgaggtcaggagatcgagaccatcctggtcaacacagtgaaaccccaactctactaaaaatacaaaaattagctggacgtagtgttgcatgcctgtaatctcagctactcgggaggctgaagcaggagaattgcttgaaccagggagtcggaggttgcagtgagccgagatggtgccactgcactctggcctggtgatagagggagactccatctcaaaaaaaaaaaaaaaaaaaaaaaattagcctggtgaggtggcgggtgcctgtaaccccagctactagggaggctgaggcaagagaattgcttgaacctgggaggtggaggttgcagggaagcagaggttgcagtgagccaacatcgtgccattgcactctagcctgggcaacaagagtgaaacttcatctcaaaaaaaaagaagaaaaaaagaaaatccatgtaactggagtttcaaagtaaatgtgaaatctggaatagttgaagcttctgggaatcacagaggccaagttgcagaggtgtacattatggaagattaaaaggcaggggaaacctttgaaatggcaatcatcagaggcctcacctcctgcctctttcgcaatacccaaagctgtttctagggttcctggtggtcgggagaggacactggacaagactgtggcagtggaaaggtgaacacccgtaacatctttggaaagacttggagttgtgaatgacaactgaactccaaacagacactaaagggaatcgttggtttacattctagctgcaggtagaggtggcctggccccaggaacctgggcactgtgagattcactctgacatctctgtggggatcattctcttcgttattttcctcaagaccaggggctagagctcaggtctgtcctttctgacaggcagcttaacaccataaaaagcagagactttctgctgctggctgcagggccctggaaaaggaccctgtttagctggcataagttatgtgctcatctctgatggattcaggcaggggtagaaacacgggtgggagaggatggttttagacaaagaacaacagccgtccatctggtcaccaaaataacctactagaaaaaggcagtctcagtttgcaggtgcagtgctgcatgcctgtaatcccagcactttgggaagccaaggcaggcagatcacttgcacccaaggattcgagactagcctgagcaacatgatgaaacctcgtctgtacaaaaaataacaaagcttgtctctacaaggaaaaaattagctgggcatggtggtgcacacctgtagtcctggctactcagaagggtgagttgaaaagatcgcttgagcctgggaggcagaggctgtagtgagacaagatcgtgtcactgcactccaacctgggtgtgacagagtgagaccctgtctcaaaaaaaaaaaaagaaggaggagtcagagggagtcagtggttactattgggctagagtcatctgaggaatcacagggtaagtgataatggggcagtggctactgagactcgccttcccattggttgaggttttgttctgaaacagaggatttggggtgggaattctcttctgtgtagatgagtaactggcttagaaaaccctgattggagtgtttctcagaacccccgtagaggccaggcgcagtggctcatgcctgtaatcccagcactttgggaggctgaggcaggcggataatgaggtcaagagattgagaccatcctggccaacatggtgaaactccatctctactaaaaatacaaaaattagttgggtgtggtggcgtgcgcctgtagtcccagctactcaggaggctgaggcaggagaatcgcttgaaccagggaggtggaggttgcagtgagctgagatcacgccactgcactccagcctggtgacagagcgagactccatctcaaacaaacaaacaaacaaaaaaagaactccagtagaacagatactgttcagcactaccagggttgtgctaggtgtggaagctcagtgaaatcttaagagttgacagttcttagaaaagggccatgtggacagggctgttccctggaaagtcctgtgacccctcagtgaccacttatttcttttgttgtcagcctttccctattttcttttcttttcttttcttttttttaagacaaggtgttgctgtgtcacccaagctggagtacagtggtggtaatcacggcagcctctaactcctggactcaagtgatcctcctgccttggcctcccgagtagctgggactctgcagatatgcaccaccacatgccccgctaatttatttttagtattttagaagcagtgttttgctgtcttgcccaggctcggcttgaactcctggcgtcaagctatcccacctcccaaagtgctgggattataggcaggagtgcccagccccagagttcttacaatgacttacaaggtcttacgtgatcttgttgcctcccttttgctctctgacctcatctttttttttttttttgagatggagtctcactctgccacccaggctggagtacagtggctcactgcagtcttcacctcccaggttcaagtgattatcctgcctcagcctcccgagttagctgggaatacaggcacgtgtcaccaggcccggctaatttttgcattttttttttcagtagagatgaggtttcaccaggttggccagtctggtctggaactcctggcctcacatgatccgcctgcctcggcctcccaaagtgatgagattacaggcgtgagccaccgcgcccggcctagtcacttttttcttaattgcaaccccgattctcagcacccttttcatcttggttttcctcaatagcccttaccaccagcagacacacatcatctgttgtacttgcttatttggcacatatgtatccacagcgcctagaacactgcctgtaacgtggaaggtgttcgatctatagagttttgtcgaatgaatgaatgaagccgactagtgcacagggagtgcagcggcgcgatggtagctctctgcagcctccaacacctgggctccagtgatccccgggctctgcccaccctccccactgccacttccgggcagaggccagcaaagcggcggcgcaagaggtagggagagaggagctgaggccccagatcagcggccgcgggcaaggtcgctcagcgggcacccggcctgggtatcggggcgcgggtcgggggcggggccggggctcaggggtggggccgggccgggccgggccgggcgcctgcgccataaaggccgccgcgcgcccacgcgcctcgcttgctgcgcgctgccggcgctccttcctcctcggctcgcgtctcactcagtgtaccttctagtcccgccatggccgctctcacccgggacccccagttccagaagctgcagcaatggtaccgcgagcaccgctccgagctgaacctgcgccgcctcttcgatgccaacaaggaccgcttcaaccacttcaggtgcgggcgggccggaggcgggggctgccacgcgcggcgcccggaaccgggcacgcgggcctggggtctggaggcgggggcagcggtgcccggggaccccagtccccgacctccaggccacggactggggcccaggccgagtccgcacttcgtccttggagtctccttggagtgcgttcctgggggcttgcagcctcgccgggagtctcggccccgggtctgcttcgttacgaggaaaaacgggcccctccgtggggacatttcccctcctcctccccgtgcagctctggccatttgagcaggggctcctttcgcagttgtgaagagaggccttggctgacgcagcaagcgggaaagggctgtccctttccatccgctcctggccacatgagcttgggagcgtctgcagggcgggcagcccgggcgggggtgtttgagggagctgggtggaaggatggagacgtcgggcgtgattcctgcagaagacacctgtgcacgaccgggaagtgggaaggagtgtttgagcaaatcatgggcgggagtgcggccaagggagctctgatcactgatactggtggaggcgggggaggggagcgactgtggctccgggctagacgtcccgatggccatccctgtcatctggatgggtgcctgagtaacttacggcagaaagtggaagccctgggaaggggtggtcccccacttcagtccgggctcctcatccagggtctgcctgcatctacggtctgtgaggatggcttctttctctgggctgctgttgcagatcatcctggtgggccagcaggtgacagacaccaccactgtgctgggtggccgcggcccttgtggggcgtgggtcagggaggatgtttcttctgggaacagctcctgcttagggcatggctccccgctagggagaccagggtgtggtcagcagcatctccatctttctgcagcttgaccctcaacaccaaccatgggcatatcctggtggattactccaagaacctggtgacggaggacgtgatgcggatgctggtggacttggtaatgttctgcttggggaggcataactggtaaccgacagagtggtgggtgagctgggctcctgggagtccccaggaccttgagtatcttgagttcttcctctcattagacctcagtcacctcctctgtgctggtgaggcacctgtccctggcttaggttctaagcagcatcccagggaccccagtgtctgatgtctgagtagacccttcccagacagcaggggagggaaccagacagcagccgtctgtctgtctcattggggacagcaccaagccttgtgtttgggggctgacacttggggtggccagtgtgggtgggaccaggcctcagtatcgtctcttcctaggccaagtccaggggcgtggaggccgcccgggagcggatgttcaatggtgagaagatcaactacaccgaggtgagcaggccccacataccctctggggcctccttccttccctttggggtttatctgactgttagccgcatcaccctgtgtcttcaccccttctcttgggcaatgcttttgcttaatgaggggcctgaaggcctttttcctcctgcttgtagcagggctttggggtgtgccttccacaagattggtttggtgagctccttggaatggttcccagtgtctgcctgggaggagcatatctcatacccacagggagagtttctcaaggctgacattttcttggagaagttaactctaatatatcctcaatgcaagttttagtagcgacaagaagaatcttagatcaccaaagacttcagcctactcaagcagtaggagtcaataggaagcagtggtgaggccaggcctgggggcccctgttcctgactcagtatgggagcccagcctggaggtataatggacactgagcacccagactctgtcctcatgatgtcattatcctcctcttacatgtgaggagtctgaggttcagaggtcacatcacttatctaagatgtcatagctgtaagaggcagaatggagattcacactcaacctgtcttgcattgtgggtctaagctgagagaggatgcaatcaaggaaggctttctggaggagtgcatttgccaataaaatgtggcgcaggagtggggtctggcagggtgagggtggggtggcatgaagccctccaccttagcaagcctctcactgggtcggaatcccaagatgatccttttcctgcccacctggggtcgttagaccttccctcaaggactcctctgctgacttcaggccatttcactcacgtggctgggccagccgcctggcacccgtcacagacttcaagtctggtttggttcctggcagttggtagttatcgggctgcttggtgagggaagcttgagttgcatgccttgctgcaaatccaaggagctgaggacactgcctaaaacgtgccagcaaacaccatggacacacattgggaggatgaggttacttcaggcttcatgagcactcatcttcggaaagcgtttatttatttatttattttgagatggagtcttgctctgtcgcccaggctggagtgcagtggtgcgatcttggctcactgcaacctctgtctaatgggttcaggcgattctctgcctcagattcctgagtagctggaactacaggtgtgtgccacccccacctggctgatttttgtatttttagtagagacaggatgtcaccatgttggccaggctggtctcgaattcatgacctcaagttatccacctgccatggcctcccagagttccgggattacaggcgtgagccatggcgcccggcctctgaaagcatttattgcttgtttctgacatgtattgttgccattctctgcctttgctcactgttcctcttttctctcactgttcatgccctgagcatctctggcaggccttcggggcctgtcctaggcatatatgggtcccctcctctcctcctgactgtctgcagcacataagtccttggggagctcctactcctctaagcatacagtgggttcttggaacaaggttatggtgctaacagagacctcagggcctgcctgtctagtggatagagggccgagctatggcaccatgcccagctgggagcatggctgcctggggttggggggggcagtctttatatcctgaccgtaatccccagggtcgagccgtgctgcacgtggctctgcggaaccggtcaaacacacccatcctggtagacggcaaggatgtgatgccagaggtcaacaaggttctggacaagatgaagtctttctgccaggtaagtggctactgggccggactcacccttggccgtgtgtgtgagttatttgggaatctgggagccctaaggggcagctcttccctcttcttgtaggcaggactcaggttctcactgcagcttaagggaggggttgcctgtgtgatcgctgaccctggagtctctgctgaggcctgaatttctcctggctctgctctgaaggaatctgctgctggcagaagtggggccagtttctttcctgaattgtagacacctatggactcatggtgacaaaccacagaggcttcaaatgaaaagtggggcccctgagagacaggacagtcaggaaaggaaggagctttttcttttttctttttttttttttgagatggagtctcactctctcgcccagagtggactgcagtcgtgctatctcagctcactgcaacttccgcctcctggattcaagctattctcctacctcagcctcccgagtagctggaattacaattatgcgccaccctgctcagctaatttttgtatttttagtagagacgggatttcaccatgttggccaggctggtctcaaacccctgacctcaggtgatctgcctgcctcacctgggattacaggcatgagccactgcgcctggccggaaggagctttttctaatctcttttgtcatacgcccttatcacccagtctagaaacagataaaacattgtaaaatttcctcaaccctggctgggcgcgatggctcatgcctgtgattcctgaactttgagaggccggggtgggtggatcacttgaggtaaggagttcgagaccagcctggccatcatggtgaaaccccatctccactaaaaatacaaaaattagccagttttggtgacatacgcctgcaatcccagctacttgggagactgaggcaggagaatcgcttgaacccgtgcggcagaggttgcagtgagctgcgattgcgccactgcactccagcctgggcgacagagggagactctgtcaaaaaaaaaaaaaaatttcctcatccccattcccagctaaccctccagaagcagcctttgtaaagtttcctgtagccaggcgcagcagctcatacctctattcccaactattcaggaggctgaggtgggaggatggcttgagcctgggaagttgaggctgcagtgagccatggtgacaccactgcactgcagcctgggcgacagcaagatcgtgtctctaaataaatttaaaaaatagaaaagttttcctgtgaagtcttccagaaagttcctgtgcacatacacatctgtcatctcctctttgaaacacgtacacatgtgcacatgcacacaggttggttttctccctgctcctctgaagcttatttccacctggaagtatgtaagcagtgtccgtgtgtcagtgacagtgcatgtaacatgccttcttttccttgtgtgtagggtggtaggggttgcctcagagaccagctaagtttccccacatcaagcacttgcctcagtgtctaccctagcggtgattctgcaggggtgggttggcagacatcctcacgtctggagaacgagggtgatgccggtgtgcctgtgtgggctgtgcatgctacgagggtgatcgtccaaactcttgtcagctgtgatcatttgctgcttgtcctaggagcagtggcctccatgtgtggctggtcagagtccagttactttggccaagagccactttcagacctgaaaatgggctgggtgcagtggctcacgcctgtaatcccagcactctgggaggctgaggcaggtggatcatgtgaggtcgggagtttgagatcagcctgatcaacatggtgaaacgccgtctgtactaaaaatacaaaaaaattacctgggcgggcatggtggcgagcacctgtaatatcagctactggggaggctgaggcaggagaatctcttgaacccgggaggcagaggttgcagtgagccaagatcacgctactgcactccagcctgggtgacagagtgaggctctgtctcaaaaaaaaaaaaccaacaaaaaaaccaacccatctctggaaaaaataaataaatcagctaggtgtggtggtgtatcccagctacttgggaggctggggtgggaggattgcttgagcccgggaggttgagtctgtactgagctgagattgtgccactgtcctccagctcaggtgacagagtgagacgcctccagggcaaggaagttgtggggtcctgatgggaatctggatttcctgaatgtcacttagggtgatcagtccatgtgatggtctttgggtgtgtggcggggcctttccagccatctgctgtgagtggcagagctgaagtgcattaaaagcctagtgctgtgtgatcagtctgggtgtgctcagccatgccacatggcgaggatggcactgcaccgtctggggtgctgtttccaggaaagccttcccttaaagctggccactggagtacctgactcaggctgataaggtatttatagttcaaaaaaagttgctgaatggcagtaatcccctggtgaggaacattccccatggctgtgctctccaaagtttgccaagattgggtgaagacgttcactgtgaccttgattgtagtggcaaaacctgaaaccaagctgtactcatttgtcaggggacttacaaagtagagtcagcacatattcatatactgtcatcctgggcaccaatagggattagggagctatagttggattgatctgccatgctgttcaggatggactgggaagttgaaaaaggaagttgcagaattggtgggtatggtaaagactcatttggtcaaatgaaggctgggtgtaattgtaataaagatagacacatttggcttggtgcagtggctcacacctgtaatcccagcaccttgggaggccgaggtgggtggatcacgaggtcaggagttcaagacaagcctggccaacataatgaaaccccatctctactaaaaaaaaatacaaaaaagttagcctggcatggtggtgcatgcctgtagtcccagctactcgggaggctgaggcaggagaatcacttgaaccccagaggtggaggttgcagtgagccaagatcacgccactgcactccagcttgggcaacagagtgagactttgtctcaaaaagaaaaaaaaaaagacacatttttcctctgggatgcttcattataacaaacctttgacagtcgggaaaggagacttgcttttttttttttgagacagagtcttactctgttgcccaggctggagtgcaatggcgagttctcggctcactgcaacctccgcctcccaggttcaagcaattctcctgcctcagcctcctgagtagctgggattacaggcatccgccaccacacccagctaatttttgtatttttagtagagatgaggtttcaccatgttggtcaggctggtctcgaactcctgacctcaggtgatccacccaccttggcctcccagagtcctgggattacaggcatgagccaccacacccagccaagacttgctttttctaacctcttttgtcacacgcctgtgagggagggttgagaagttgaacaacttattttatttctttctgtattgatggaaattttcccatggcagtttatttaaagaaaaagtagggccaggcacagttgctcacatctgtaatcccagcactttgggaggcagaggcaagaggattgcttgaggccaggagtataataccagcctgggcaacataacaagaccctgcctttaacaaaaatttaaaaattagccagctgtggtggtgtgtacctatagtcctggctgcttaggaggctgaggcgggagaattgcttgagcccaggaatttgaagctgcagtgagctatgatcatactcctacattccaggtcgagcaacagagcgagaccctgtcgttaaaacaaaactaaaaaatacccagcaaggtgcagtggctcttgtataatcccagcattttggaagggtgaatcggatcactgcaggccaggagttcaagactagcttgggcaacctagaccctgtctcttttttgtttgtttgttttttgagacagagtctctctctttcacccaggctggagtgcaatggcctgatctcggttcactgcaacctccgcctcccaggttcaagcgattctcctgcctcagcctcccgagtagctgggattacaggtacctgccaccacacccagctaatttttgtgtttttagtagagatggagtttcaccatgttggctaggctggtctcgaactcctgacttcataatctgtccacctcagcctcccaaagtgctgggattataggcgtgagccaccgtgcccagcctattttttttttttaattaaaaaataatttatagtctgggtgctgtggctcacacctgtagtcctagcactttgggaggccgaggtgggcggatcacttcaggtcaggagtttgagaccagcctggcctacatggcaaaacccgtctctactaaaaatacaaacaaaattagccaggagtagtggcaggcgcccataattccagctactcaggagactgaggcagcagtatcatttgaacccatgaggtggaggttactgagagctgagatggcgccactgcactccagcctgggtgacagagcgagactctgtctcaaaaaaaaaaaaaaaatttataactgggcatggtggtgcatgccggtagtcccagttacttgggaggctgaggcaggagaatcgcttgaacccgggaggtggaggtttcagtaagctgagatagcaccactgcatgccagcctgggtgacagagcaagattccatctccaaaaaaaaaaaaaaaaaaattaaaagaaaattgctggatcttattagtgtatagtaattttttattgatgtgtgggaaattattccaaaatttagcaactagaagcaacaatcaccgtctctttatgtggggaatttgcagtggctgtgtttggtgtagtggctctgatattctaaggttgcagtcaagatgttggctaaggatgtggtcatttgaaggcttcatgggggttggagggtctgctttgaagatggctcactagcagtgctgcctttgggaggcacagacagttcgagtgtcctcatgacaaggcagcttatttctcccagagtgagtgatccaatagagagtaaggcagatgcctggaggtcttttgtgacctaatatcaggattcacattctttcttttttttatttttatttttttgagacagagtttcactcttgtcacccaggccagagtacaatggcgtgatcttggctcactgcaacctccggtccccggctcaagcgattctcctgccttagcctcctgagtagctgggattacaggtgcccgccaccatgcccgcctttttttttttttttttttttttaaatttttttagtagagatggggtttcaccattttggccaggctggtcttgaactcctgatctcaagtgatccgcctgccttgccctcccaaaatgctgggattacagggtgaaccaccacgcccggctacactctttgatttctataataccccgttggtgttacagatcagctctggtcatcatgggaagggactgcatcagtgggttaatgccaggagacaaggaccactggtcaccatcttagaaggtgggggactatcatagtcccgcttctggcgcctagtgattgattttgttccttccacacacagataccccactcactttctcctaagtccatattctgttacagtattagaagtctgttagaagtctagaacctcattttgtcaagtacaggtgtagtagtacctgcatttcctttagtacagttcctttcaatctgaagacatgagaatttaaagagacaaattacccctcacacacccagcatacaatggtgaggtgggcatgggatgactggtatgtatgggataattatttcttttcttttctttcttttttctttttttctttgttttttttttttttgaggtagggtctcacactgtcgcccaggctggagtgcagtggtgcagtcactgctcactgcagcctcgaactcctgggctcaagcaattccccacctcaaccttctaagttgctgggactacaggcacatgtcaccatgcctggctacttttttattttttgtagagatgacgtcttgctatgttgcccaggctagttttaaactcttggcctcaagtgatcctcctgcctcagtttcccagtaagtgctgggattataggcatgagccactgagtccggcctgcatatttaggtttttattatgaccacactgtacttctgataccaaaatctgtattagttatctatcattgtataacaaatgacatcaaaacttgggttaaaacagcaatacacttttttttttttttttaagacggagtcttgctctgtcgcccaggctagagtgcaatggcgtgatctccactcactgcaacctctgcctcctggatttaagcaattctcctgcctcagcctcccgagtagctgagattacaggcacacgccaccatgcctggataatttttgtattttttttttttagcagagacggggtttcaccatgttgactaggctggtctcgaactcctgaccttgtgatctgcctgccttggtctcccaaagtgccaggattacaggtgtgagccaccatgcccggcctagcagtaaacttttattacctctcacagtgtctgtgggtcagaagtttgggagcggcttagctggttggtcttggtttggggatctctcataaggctgtagtcaacatgttggccagcgccccagttatcggaagttttgatgggtttggaggacccccctctaaagtgtcccatacacaggaagcgagttggctgtgacttttggaaaaaggccttagttcgctgccgcgtgggcttctttatgaaactgtttgaatgtcttcacaacatgatagacagcttccccaaagcgagtcatccaagagagcaaagcagaaactgcacgttctctgaactcacttctgaagtcacatttcacccctttttgcagtctctggatgggtgcataggtcacccctcccagcacaggcggaagctatgcagaggcatgaattccaggaagcaaggatcactggtgtctgattggagactggctgcgggtctgatactcctttccccagcatagcccagtcacagttttcaacatttcacatctcttggtctctggcatagcagattctgccgagttatccctggttttgcaaattctgacagtgtcgctgtaaggtagggatgtctcactgttgtaaccaggaaagagtctagttggtggtgagtgtggcagggaccagtgtggtctccagagactcctatgccttgtgtagtggctcacgcctgtaatcccaacactttgggaggtcaagatgggaggattatttgaggccaggagttagagaccaggctgggcaacgtagcaagacgctgtctctacaaaaaataaaataggctttgcgtggtggctcatgcctgtaatccaagcgctttgggaggccgaggcaggtggatcacctgaggtcaggagtttgagaccagcgtggccaacacggcgaaaccccatctctactggaaatactaaaaattagctgggcagggtggcaggtgcctgtaatcccagctacttgggaggctgaggcaggagaattgcttgaaccctggagcctggaggcggaggctgcagtgagctgagatcgtgccgttgtactccagcctgggcgacggagtgagaccctgtctcaaaaaaaaaaaaaaaaaggctaaagcagagcattttgttctgtttttggagtcagggtcttcctctgtcacctaggctggaggtgcagtgttgcgatcttggcttgctgcagcctcaacttcctggactcaagcaatcctcctgtctcagccttgagccaccctgcctggcccctaaggcacagttttaaaaataagtaaatagcgaggcgcggtggctcacacctgtaattccagcactttgggaggccgagctgggcagatcacttgaggccagtaattcgagaccagcctggccaacatggcaaaacctcgtccctactaaaaatacaaaaaaattagctaggcatgctggtggcgcaggcttgtagtcccagctactcaggagactgaggcatgagaattgttagaacccagaaagtggagactctgtctcaaaaaaaaaattaaaaataaatagctgggtgcggtggctcaagccagtaatcccagcactttgggaggctgaggcgggcagatcacagggtcaggagatcgagaccatcctggctaacacggtgaaaccctgtctctactaaaaatacaaaaaactagctgggtgtggtggcgggcgcctgtagtcccagctactcaggaggctgaggcaggagaatgacgtgaacctgggaggcagagattgcagggagccgagatcatgccactgcactccagcctgggcaacagagcaaggcttcatctcaaaaaaaaaaaaaaaaaaaaaaaaaaaaaaaaaaaatatatatatatatatatatatggtaaattaaaaacaaaaaaatagaggcacctgcgagggcctgaaagctgggactgaggtaccaggacacggcagtaatgatgtttttgagcagcggattatgcctgggggtttgggctgatggcatcttcgcccctgtgccagcgtgtccggagcggtgactggaaggggtacacaggcaagaccatcacggacgtcatcaacattggcattggcggctccgacctggtgaggagaaaactgccttggggtagggtgggagtctgggcactgttggtcccactcaggtctttactttctccagggatgggacctggctgtctccacttttcgtgggccctgaattcttattctctgatgctatgtctccccgcagggacccctcatggtgactgaagcccttaagccatactcttcaggaggtccccgcgtctggtatgtctccaacattgatggaactcacattgccaaaaccctggcccagctgaaccccgagtcctccctgttcatcattgcctccaaggtatgagtgccgaaaactgcccggcccctggccctgtgtgtgttggggtggggagggacagctgtcttgccatccccctggccattggtcccttttggtgggttccgagtgaaccatggtttgtggatcaggtcagtacagctgccctagactgtttccatgcctagcagcaaataaggttgactgatgaaatcctgaacacatcagtttgaacctttgtgtcctgaccacacccgctcgccttgcggcatctctgctcagcctgggactgctcgccactttcttacaaacctgtcctttatgcctgctccttttcttgttgttgtttttgagacagagtctggctctgtcacccaggctggagtgtagtggcgtgatctcggctcactgcaatctccgtctcccaggtttcaagcgattctcctgcctcagcctcccaagtagctgggactaggcacacaccaccacgcctggctaattttattatttatttatttattattattattttttagtagagatgggcttttgccatgttggccatgctggtcttgaactcctgacctcaggtgatgcacccccccttggcctcccaaagtgctgggattacagtcttgagccgccatgcccagccatgcttgctcctttctgatcccagagccatgccctgataatagaggggttttgtttgtttttatttatgttctatttactcacatgaatgtacataaaatatgaagaattccatctgaattctgagataccttccagcctgggccgaagagagcctcaggttgactgcagcccctcaggggagaagctgcggcctttgacctgcaggcttagggttggggggtgtgtttaccgtcccccctcctctggttttaaagagctggaatctcaggaggttatgtggcgtcactgtcactgacctgcaaatactgctccatgggacagctgggcattgccttggcctctactgctgaaccctggctcaaggcctgcacccacccctaagctcgggcgcccactgctgttctctttggttgcagacctttactacccaggagaccatcacgaatgcagagacggcgaaggagtggtttctccaggcggccaaggatgtgagtgggctatagggccttcctcgtggttagcctctgggctgggaagagcagggtgggcccctgagtgaccaagtctggccgtgtttctcctgaagttggaagtgaaggcggccttgccggtgcctgcctttgctagatgagatgattgttcatcttggctttgtcagacccagccttgcagatgtgacagaacctgctctcgctggctgacagcccttgcatggccctttctctgcaggcccttggcgctgcaggaactcttggccacacctattttataggggagggacgtccctgagccccgtatgcttgtaagatgggatgagcaggcggcctgtgacccgtctgctttcttgaccttgacctcgatgtgggccttctccaacagtctcagaaccaaggactgggaatctcagtcccatgcagggccttggttcctctagtgatgggaagtgactaccctttgtctccctgggctggctgtggtaacttggctctgtctcttgtagccttctgcagtggcgaagcactttgttgccctgtctactaacacagtaagtgcccccgtggtcccctgtactgccttcctgggagtgcccagcatgtccaggtcatggcctctcagagacgcggttcgtaggtctggtggatcttggcttggctgatggtatggaaggtttggttgcctgtgggctgcaagccttccttgccttttccgcatttacccattcaacctctgcagctttgaggagggaggcttggagtcagtgggatcacgataaccccttcttccgtctcccaggcctgactgatacacagaacccttcatacacatgaccttcctaggcctttgtgcccagcatctccccaaatgtgacatgctaggtaggggtagaggatgcattccatttttcacttaaggacataaagccccaatgaagggaggtgacattttgccccctacttagtgtgtgtggttttgttttttttttttttttttttttttttaagacagtctcactctgttgcccaggctggagtgcagtggcgtgatcttggctcactgcaacctctgccttccaggttcaagcgattctcctgccttagcctcccgagtagctgggattacaggtgcacgccaccatgcccagctattttcgtatttttagtagagacggggtttcaccacgttggccaggctggtctctgactcctgaccttaagtgatctgcccacctcagcctcccaaagtgctgggattacaggtgtgtgccaccatgtccagcttattttttgagacaaggtcactctgtcactcaggctagagtgcagtggtacgatcttggctcactgcaacctctgccttctgggttcaagtaatttttatgcctcagcctgctgattctgggattacaggcgcccactaccacgtccaggtaatttttgtatttttggtagagacaggttttctccatggtggccaggctggtctcgaattcttgacctcaagtgatctgcccacctcggcctaccaaagtgttgggattataggcatgagccactgtacccggcccacttagtgactgtatgagtaggtgatgccaggattagaacctgggtctcctgtctccaagttctcacagtctgcctggcctcgaggttgtgcaggctcagcagggcatgacagagtgagggatgctccaggagtgacagcagcagtcagccagtgggcactgtgctgtgtcagagctggggactacacccacatctccctcccaccccctccaccatcatccccacatctctgcctccagtgcctacccagctgcagcaggacgccataaggctggctaaccatagcactgttgcctgcctgcaactgactggtcagtagggcttctcctcctatgtggaataggtaaggaattgctggccctgtctgccctggggaccagaatacctgatggctcctcagagcttcctggtgcagtcaccctcccacacatgggaagggctgggtggctgttcagcctgtgtttgtttgcctggcctggtaggtggcccctgcccacacttgggtcccagtcctaggttcggttcccagatgtccaggggtatcatgctctggtgtcccaggcaggcctgggtgagagctgttgcagagcagtgtgtgggccaggtcctcacacggggttacagctgccctcagcagggggctttgcaggcacaacgtcactggcgtgctggtcatggactgatctggtgtccagcttggggtgggcagatcctgggccctgccctcgactcacaggctgctccagccctgccccatccctggctctggggaaggtgaggctcagctcacggagcacagctccctgcctcccggagctcctgttcccatcccgctagcaaatgcttctttgcatttctctccctttgtttttttttttgtagaccaaagtgaaggagtttggaattgaccctcaaaacatgttcgagttctgggatgtaagtacaagcacttctgcactgggtgaattaagtgtcctttgccaagtcatggctgttgagaggcccatgaggtcaggtcagtgtttattgagtacctgctgcatacctagcttggggaaaggtagagaggccctcagagaggcttggagggcaagagcaacccaggcaggatgagggctccacttccacctgagggcgggctgagcttgcagggccacatgacactcccttgggtgcctgcctgcaacacccactgtggggtaacccgagtcccccttgccacgctcacagagttgaggttgtgagttattctcagtgatgacctttctctgaactgcagccaccatctgtaaaggccaagggcagggtgaggcatgaggtatgaccgggtaggcctggaaaggagcaacaggagctgcaggaggagctgggggggtggcgtagaggaggcgccaggctggggcagcttgcagagcaaaccctgccttgagtgacagggctgccgacccctctgtagcaacaggtggtccatgggaccacctctgctggagccgagcagtgagccacagctttccttgtgcacttgcctgagctcagcagtggtgtgaggagggctctgactgtgaagcccagggtgcaggggtgcagtgcagggtgtgatgcaggcactgtgaatgctgtgggcatggccgggcttacgtgcagggctctaacgctgtggcaggcgcagcagagagggcattgcccatttggtggttttcccacctggggctgtctccaggcatttggaccagaggccctttgcttggtgatggcatccacagacataacctcattcctttgaaagctctaaaggccttttactaccagggtctgggagagaatgaagccctaatcccttaagccatccactgtgtataatgagttaacttctttctagaatgagactagttacataccatccttggaagaattgacgagaatcactcaagtcattttctgcatcctgtggctcagatgcggaacactggtcaagagagactgtgcggcttctaataaatgttgcatggctgataatggagggcaggcaccttccacctcctccttgggatctggagcctgagcaggtggtgggcagggatgtgtgggtgctgctgccagccaaggagccaagcagatcggggtgtccttgcttgtcaccacccagcatgtagagatgagttagggtgtggcttaaggagaggatgggtctggcctcccaggtaaggcctaggaatgatagctggacacaggaacatggggccagggctggctggtgagacctaagtggaggcctcctgggccaggctagacagcccacaacggctggaggagggacctgcctgagttactagagtgtatcctgctgaatcaagaaggtgatatctgaagaacccagggataggagcaggcgaagttcctgcaggtggggtctcgggtgagctacagccatcagctcaggcctagggatgcagtgccggccctcaggtgagatcagaagagtcccgtctggtaggggtatgtagaagaggtaattcttggtccgccagggccagttttgcggcagccatgggtgtcgggatcaggcaggggtgtggtgggaaaccatggggtctctcagggctcggccagggtcagcgcacgccacagggccagttttggctggagaggcctgaagcagagccagagcaggtccaggtgagttctgaagaggagccaggacaggagagggacccataggtctgtgaattccagaggagaggcaggtatttagaggtggttctgtcaggtgaagtctgaggagccaaagctatgtatgtgcatatgtcagccgggctctgtgggaggtggtgtagacctatggcatgggacaggtgtgcacgctgggatctctggccggttccgaaaagtgaggatcaggtagtgggtggctgattgcacaagtttagaacccaggattagggacacacaggtcagcacctgcttctcagcatcctgactgggtgtgatgggcagagctcagggcgtcagaggcctctgagaatttgtgactgaagtccaagtctgtggcatcagggtctgcagagcccagatgcgggagaggtaggaatgtacctggtgatatgaggcaaggacaggggagctggggcaggtgaggcaggcaggtggcatgaggagctgtgctgggtgggtgcggtctgagtggctcaggttgggtaaagggccagagacctgggtctacagggcagacatcaaggctgagccagtcagacagtgtttgtcaacactgggctctcaccaggctccctcaggccgaggtcagcagccagggatctgtcatgtgtgaggaaagtgtctgttcaggttaggtgtgtataatgcagcctttcagagccgcgtctgtctgaggtcctaggagctggaatcagacaggtttgtatggctgggtttctaggggaggcctgaggagccaagactgtactcaggtaggcagaactggaccagtctggtaaggacgttggagctaaagataggcagacaggtcgagctgggtctgacaagtgagggctgaaaatctgtgattgggtccaggttggagctgtgtccttgggcgatgtctgagcagctctggtgggtgagcctgggtcccctgggaagagaccagacaaagggatggggtcagacaaagggatgacgaaccgcatccatcagaaaggtggatgaagcctgggtctggtcgaggtacgtagagcagatctagcaggcgaggtttcaggggttaaggtgagacacaggtatgtatttttgggtctcacaggttaaggtctgagccactgaggtcaggctctggtttgtatcccaagaccgagaagctgtgttaagcatggtgggtagagtttgtcaggtgacatctatgaaaccaggagcatgcaaagataggttgaccggaacagccatggtcaaaccaattaaactgtcctgcagttgaggtcaggcacaggtagaacggatctatcaggtgaggcccaaggagtccggattaggctcatctagaaagacctggatgtggtagatgacctctgaggatatgaagtgaaggcaggtggatagagccaggtctctcaggaggtctgaggagctgggatctggcacagtgagcaggtctggatttcccaggtggtgtcaagacagatgggtaggccaggcacagtggctcacacctataatcccagcaatttggaaggccaaggcaggcagatcagttgaagtcaagagctcgagaccagcctggccagcatagcgaaaccccgtctctactaaaactacaaaaattagccaggcatggtggtgcatgcctacagtcctagctacttgggaggctgaggcaccagaattgcttgaactggggaggcagagtgagccaagatggtgctactgcactccagcctgggtgacagtgagactatctccaaaaaaaaaaaaaaaaaaaagcgggggttgggtgtggtggctcatgcctgtaatcccagcactttgggaggccaaggtgggtggatcatctgaggtcaggagttcaagaccagcctggccaacatggtgacggggtgaaaccccatttctactaaaaaatacaaaaattagctgggtgtggtggcacacgcctgtaatcccagctactcaggaggctgaggcaggagaattgcttgaacccgggaggtggggtttgcagtgagccgagatcatgccactgcacttcaacttgggcaacaagagtgaaactttgtctcaaacaaaaaacaaaaaaaaaaaaaaaagaaaaaagatgggtgggtagaagttcttctcctgggtgaggttgaggagctgtggccaggtacaggtatgtaggtatgtggaattgagtttcttgggtgaggtctttggagcctggcccaggtacatcttcgggtctatcaggtctgaagaacgggagttaaacacaggtgtgtagaacagggtttggcaggtaaggtctttggagccaggatcagggcagcttcacaaagctgagtgtgttcatgagacctaaaaagtcatagtcaagcccaggtaagaagaaccaagtgtgttggatgaggtgtaagcagctgaggtgtgaagtagaggtaggcagagctggcccacaaggtacaagctcaggaaccctcatcacatgcaggtagggggtgctggtccaccaggcacaagcccaggagccagcattgagcacaggtaggcagacttggcccaccaagtatgatctgaagagccaacatcaggctcaggtaggtagatctggcatgccaggtgtactccaaagagccagagtcaaacacaggtaggtagagatagtctttcaggtgtggtttaaggagccaaggtcaactacaggtaggtagagctggcccactgggtgtggtttgaggagccagggtaagcacaggtaggcaaagctggcccaccaggtatggtctgaggagccagggtcagactcaggtaggtagagctgcctgccaggtatggtctgaagagccaggatcaagtacaggtaggtagtctgggtcactaggtgtggtctgagaacccagcgaaaagctcaggtaggtagagatagcctttcaggtgtggtctgagaacccagggtcaagcacaggtatgtagagatagcctttcaggtgtggtctgagaacccaggttcaagcacaggtaggtagagatagcctttcacgtgtggtctgagaacccaggttcaagcacaggtaggtagagatagcctttcaggtgtggtctgagaacccagggtcaagcacaggtaggcagagctggcccaccatgtgtggtctgaggagccagggtcaggcaggtagacaaaactggtctgccaggagtagtctcttgaaggagagctgaggagttaggttgaatgcaggtagatagagttggctctttcaggagttggattcaggcacaggaatgtgcccctgggtgtttgaggtgaagcctgaagaaccagagttgagcctaggtgtatagagcggcctcccaggtcaaccccatagcatgggggtctctacaggcaggcagaacattgtgggtttcctaggaggtctgtggcccctaagttagacgtgggtaggtagatgtatctctctcaagcaaggactttgtagctagagagacatacagctggggtcttgcaggtgaggtcattggtgcgtggttctggcttagttgtgctgactcagtcttaggcctggggacagtgggttagtcacaagttggtagaactacgcatctcagctggggagcacaggtaggcagagatgttccatttgatgaggtctgaggctcctcagtgagctcattggtgctgacgttaagcagagattggcagcattggatctgtctgtgagacatgaaaagccaagccagacacaggatgtggactgccgaggccaggctcacataaataaagctggaccctgggaggctgtaaggaatctgagttgggcttaggcaagggaaccgggtctgtcagtcaaggtgtgaggggtcaggttatgtgaagcctggtctatcagctgagatgtctggaacccatctttgacaggtatataactctgtagcctgaggcactggagttggacacaaataggcagaactaggtctcccaggtgaaaccattgcatcgatgctcagtgctggtatgtttatctggtgttgtcagtgagtctgccgatgcaggctcagtgctggtatgtttacctgattatgtcagtgagtctgtggatccaggctcagtgctggtatatttacttggttgtgtcagtgagtctacggatccaggctcaatggtggtatgtttacctggtgttgtcgtgagtctgtggatccaggctcagtgctggcatgttgacctggtgttgtcagtgagtctgtggatccagggtcagtgctggtatgtttagctgacattggcagtgagtccatggatccaggctcagtgctggtatgttgacctggtgttgtcagtgagtctgtggatccaggctcagtgctggtatgttgacctagcattggcactgagtctgtggattcaggctcagtgctggtatgttgacctgacattagcagtgagtctgtggatccaggctcagttccacagaggttgtataaacatggtctcaggtgggttcttgacacctgggttcaagcacaaaagtactgctgggcttgttaggtgaagtgggtggggtctagcacaggaatgcataatggtgaggctggccaggcctggggaaggtgggtcagacacaggtgagaccttcggtggtagggtcagacacaattaggtgagtagtgtgggctcttatatcaagggaaagccgtagtcattgtaggtgtttgtacctgggtctgcctggtgatgtctagggaaccctaaagatcagctgggacaggtatctgttctcagcaccctggtcaggtatgatagacagagctcagggtaatacagagggctgaggatctgtaaccagtccatggtgttggtctgcatccaagatggcattgtgctccagttgacacagggtctgagttaaaagtgaggaaagttgccaggcgcagtggctcacgcctgtcatcccagcactttgggaggccgaggtgggtggatcacttgaggtcaggagtttgagaccagtctggtcaacacggtgaaaccccatctcctaaaaatacaaaaattagccatgcatggtggcacatgtctgtaatcccagttactcaggaggctgaggcaggagaattgcttgaacctggcaggcagaggttgcagtgagctgagatcatgccactacactcaggcctgggcgacagagtgagagaccctgtctcaaaaaaaaagaaagtgagtaaagtgaggaaaaaggtagatgatggttagataaggtgagatctggggcactggggcaggttaggcccaggacattgaactgactgaggagctgcatctataatgtatggtctcagaggccactgcacttaaaggtgaggtctagagacccatgtctgcagattgagggttcggaggctcaggtcagacactgcttggcattgctgggctgtcacaaaactgggatctgaggacctgttctcggccaaggtgagcagcctggactctgtcagccagagggctggctgtgtgctgaagtttagtttctagagctgagtctgggctgggtgtggtggctcatggctgtaatccctgagcttcgggaggctgagatgggaggctgaggccaggtgttcaaaacctgcctggacaacagagcaagaccccatctctacaaaaaatttaaaaaatagtcaagcatggtggtgtgtgcctgtagtcccagctactggggaggctgagatgggaggatcacttgagcccaggagtttgaggctgcggtgagctgtgatcatgccactgcactccacctgggcaacagagcaagaccctgtctcttaaaaaaaaaagaaaaaaatagaactgcatctgttagatgagatgtgagagcctatgtcaagcatgatgtagtctgtaggactgcgtctgtcaggtaaggttcccggaaacccagagcctttccaagtgagtggccccaccggtcatctcattgcccaagccagaaacctctcggccacactggagagctcccagaatgagtcctctgcactccccagtccatctccggggcttcaaagtggcttgtttgcttctgtccttgtcttagccgcagactgttctcagtcctcccaccgtgcctctcagcttccaccctgcggtccccaccccttcctttatcctctggaaggtgctatgcttccccctgcctcagtgggcttccaggagagaattaagccctcacagcccaaggcatctactggatgtaataagtgggcacctctccttcgtgtctagaaggttactagtcttggaccatccttgggagaactgagaagtcactcagatcattttctgtgggccttaattctgtcacgcttgagaaagactgctttggccacgggacctttgcatgtgctgttatggctgctggaatgctccctcagtgcttctctgggtcatgcctgctcgttcttgagatcaagggtcaagtacccctcaggttccttttataagtggcctcagcaccatgttccaatttctcctcagcacttgtttctcagtttcacatttattggcatgattatttgatgtacgtctctctcccacactctgtgtccgttgcctgtgctagaaatgtgggaggtgctccataaacagctgttaggaagacatccgtgaagttctgaggactctgatggcaccaagtggagcttgcaggtgtggcttgagaaggtgcagtgtgaatgataggcctaggtgataggccgagaagatcggtcaagcccagatatgacccactgggcctgtcagtgtccaggaggtggggtgaggcacaggtctaaggttctggatctgtcagtaccacctgaggagttgggaatgggcacaggtacaaagtgatgagtcttcattgttcaacaaagaatggcacaggtgtgaggatctgggtttgtcagtatctgaggatgtggggcctggcacaagtatgaggcactgggccactgttcaagcaggtgggctggggaacagaaatgtagctgtgggtttttaatatctgaggagacctagccaagtgtagcagagagctgctgggtctttcattgtccaaggaagcatacctgggcacaagtatgagactgagaaggtgggtcctggcaccggtaaggggctctgggtctgcaagtgtctatggaagtagggcctggtacaggtatgtggtgctggaagaggtatccaaggaggtgggctaagtacaggtatgacatctgggtcttccagtgtgtgaggaggtaggatctggtacaagtatgaggccctgggtctgctggtgtctgaggagataacagcaggttacaggtatgaggccctgggtctgctggtgtctgaggaggtaacatctagtacaggtatgaaatctgggtcttcctgtgtctgagaaggtagcacctggcacaggtatgaggatctgggtcttcccaatgtttgaggaggtagcatctggcacaggtatgaggatatgggtcttccatgtctgaggaggtagcacctggcacaggtatgagaatctgggtcttccagtgtctgaggaggtagcacctggcacaggtatgagtatctgggtcttcccgtgtctgaggaggtagcacctggcacaggtatgaggatctgggtcttcctgtgtctgaggaggtagcacctggcacaggtatgaggatctgggtcttcccgtgtctgagtaggtagcacctggcacaggtatgaggatatgggtcttccatgtctgaggaggtagcacctggcacagatatgaggatctgcgtcttccagtgtttgaggaggtgagtttggactcaggtttgaggcccttgggcttccagtgcctgaggagatagcatctggcacaggtatgaagccctgagtcttctagtgtctggggaagtgaggctgggtacaagtatgaggatctgtgtccatcagtatctgaggaggtgggatcgggtcctggtatgaggatctgggtctgtccatgtctaaggaggtaagatctggccctggtatgaggatctaggactgtccatgtctgaggagttaccatctggtacaggaatgaggatctgggtctgtcaatatcagaggaggtaggaatctggtacaggtatgaggatctgcgtctgtcaaagtctgaggagttaccatctggtacaggaatgaggagatgtgtcttccagtgacttaggaggtacgatctcttataggtatgaggatctgggtctgtcaatgtctgaggaggtaggatctggccctggtatgagaatccgggtctgtccatgtctgagcaggtaggatgtgtccctggtatgaggatccgggtctgtcaatttctgaagaggtgggaatttggtacatgtatgaggatctgggtctgtcagtatctgaggaggtaggatctggtacagttgtgaggatctgggtcttcgggtgtctgaggaggtggcatttggcacaggtatgagaatctggatcttctagtgtctgaggaggtgggatctggtattaattatgagaatctggttctgtcagtgactgaggaggtaggatctggcataagcatgaggatctgggtctgtcaatgtctgaggaggcagtatctggtacaggtatgaggatctgggtctgtcatgtctggaggtaagatctggcatgagtatgaggatttggttctgttcatgtctgaggaggtaggatctggtgcaggtataaggatctgggtctttcaatgtctgagaaggtaggatctggtacaggtgtgaggatctgggtctgttaatgtctgaggaggtaggatctggcactggtaagaggatctgcatctgtcagtttctgaggaggtaggatctggccctagtaagaagatctcagtctgtcaatttctgaggaggttggatctggcccccttatgaggatctgagtctgtcaatatctgaagaggtaggaatctggtacaggtatgaggatctgtgtgtgtgtcagtgtctgaggaattaggaatctggtacaggtgtgaggatcttcatgtctctgtatctgaggaagtaggatctgatacaggtattaggatctgggtctatgtctgaggaggtagcatctgatacaggtatgaagacctgagtctgtcagtgtctgaagtggttggatctggccctggtatgaggatctgggtttgtcagtatttgaggaggtaggatctgtccctggtaggagggtctgtgtcttctagtgtctgaagaagtaggatctggccctggtatgaggatctgggtctgtcagtatctgaggaggtaggatctcatacaggtatgaggatctgggtttttcaatgtctgaggaggtaggatctggcacaggcatgagcatctgggtctgaccatgtctaaagagttgaagctgtgtgcaggtatgaggccttgggtctgccagtgtctggggaggtgaggctgggcatgggtgtgagaccctgggtctgtccatatctgaggaggtaggatctggtatgagtatgaggatctgggtgtgtccgtgtctgaggaggtgggccctggcacaggtatgaggcctggggtctgtccgtgtctgaggaggtgggccctggcgcaggtatgaggccctgggtgtgtccgtgtctgaggaggtgggccctggcacaggtatgaggtcctgggtctgctggtgtctgcagagacagggcccgacatctcagggaagaccacggtaagctcttcagtttgtcttgtggctgtggtcagtcatctgtagtctgccctgttggtcttcccatgtgttgccagcacctgcctgctgccttgcttcctggaggtgggttgggccagggccctccgagacgcccctgtgcaagaccagggacagggtttccggcaggaggtggggggcggggtgtgccggccctccctcagcaccttgtcctgtctctcctagtgggtgggaggacgctactcgctgtggtcggccatcggactctccattgccctgcacgtgggtgagtgtgtttctgtgtcttgcagcccctgtgggagacagtgttgcagtctaaggtcggggtagggggcttgtgtccctgaacatcatgctgtcctcacaggctgctggcctctctgcagctggctgggatatttatttcatgtccagaaggaaggtctgggtttttttgcgtgtgcaagttggcccccgtctttgcccctcacaactgcagtcctgtttctctcctatcctaggcagagtcagatccctgcactcagggccacctctcactggaggggctttgtctaggtccgagtcctcccatgtcgtatcttctggctctccatgcagccttccttcgttgcagaaggagctgtgcccactgcccacaggacgcagggtgtggccacttctgttgactctgcttttgtgtcacaggttttgacaacttcgagcagctgctctcgggggctcactggatggtgagtgctgaggctggttctctgccaagtgctggccagaggcgcgtgtgttggtcctggtcccccgctttctcccccactgtcctgtccctcccctccccgtgcagctgctcagctcccactcatcctgctcctgtttcaggaccagcacttccgcacgacgcccctggagaagaacgcccccgtcttgctggccctgctgggtatctggtacatcaactgctttgggtgtgagacacacgccatgctgccctatgaccagtacctgcaccgctttgctgcgtacttccagcaggtaccagctgccaagccaggccttggagtcagcaagatttgtggggggtctgggaggtctaggaacctgggtttcagctcctccaggagctctttgccccattgcccttgggcctggccaaggtccatctgtgctccttgtctcaggatgaatctttgtaactgaggttggttccatttgagtgtcatctgagtttgatcaccatgggaggggcatgactggtgatcatggtgccctggctagggaggtcctggcttgactcaggggatgtttctcagctggggtcacttctttcttgcacatcactatgcatgcctaccatagtgtctgaggacgtaggatctagccctggtatgaggccctaggtctgttagtatctggggaggaaggatctggtacaggtatgaggacctgggtctgtccatgtctgaggaggtgggatttggccatagggtggggctgcaagctggaatcccttatagcctgcactgcctttatccctccagaaaagcaagtgtgtatctagtctgtggtggcctctttggactacatggccctcttctcccttgggatctccagagccccccgagaggcttagcaggccctctcctagtcacattatgtcccagaaagcttttccacacctgtccctgcttttttttttttgaacagattctcactctgtttcccaggcaggagtgcagtggcgcgatctcggctcattgcaacctccgcttcctgagttcaagcaattcctgtgcctcagcctcccgagtagctgggattgcaggcatgcaccaccttgcctggctaatttttgtatttttagtggaaacggggtttcactatgttgcccaggctggtttcgaactcctggcctcaagcgatccacctgccttggcctcccaaagtgctgggattacaggcatgagccaccatgcccaaccctatccttgcttttgtttagtacaaagccagtccctgtccagcagctcttgagttgctctgggcaggtacagaaggcttcaccaacacctggaagcaaatcctgtgactgaaggagaggccaaggttccccaaatcccagctgccttggtgagggttgccatgaccagggcccaggtgggtacccaaagcctagcatttagttgtggtgacagccctcaaaggctgtactcttagccaggcatggtggctgatgcctgcaatcccagcaccttgggaggcagaggctggggggaattgcttgagcccaggagttcaagaccagcctgggcaacgtagtgaggcccggtctctacaaaaaaaacccacaaaaactaacagtagccaggcatggtggtgcggcacctatagtcccagctacttgggaggctgaggcaagaggcttgcttgagcccaagaggtcgaggcttcagtgagcaatgattctaccactgtactccagcctgagtgacagagtgagactctgtctctttgggaaaaaaagaagctgtgcactctggaccccagcctgctctcccttaagaaatgagctgattttgtgaccgattttgtctttagggaggtccttgcctgacctccagacccaccttttcctgggcatgagtccttcctgcacagtggcttaagcaggaaaggttgggaggctgtgtcctcactggtgtggggaggaaggggatcgtgcctgtggacacgtgtgcaggtccacctcacggtgtcagggcagggtgggtctgcctggagcatctgggcaggactttggcatggtgcaggaaggagcaggatttgcgtacagtgtgtgaaggatcaagacttgcaggaagagggttgggttttttttctttcttttcctttcttttcctttttttttttttttctttttttttgagttggagttttgctcttgttgcccagtctggagtgcagtggcatgatctcggctcaccacaacctccgcctcccgggttcaagcgattctcctgcctcagcctcccaagcagctgggattacaggcatgcgccatcacacctggctaattttgtatttttagtagagacagggtttctccatgttaatcaggctggtctcaaacttccaacctcaggtgatccgcctgccttggcctcccaaagtgctggaattacaggcttgagccactgcgctcagcctctttctttctttttaaatgttctttcattttgccaagaactgggtttctgttccttttccagggcgacatggagtccaatgggaaatacatcaccaaatctggaacccgtgtggaccaccagacaggccccattgtgtggggggagccagggaccaatggccagcatgctttttaccagctcatccaccaaggtaggcccctgtggcctgggaagggtgatgttgggggagggaaaggatcttccagaagagatatctcacttaggtcagtgccctcctctaggccatatggctagctcccatgggctggggtcatgtgggtgaccacagtgcccttcacaggcaccaagatgataccctgtgacttcctcatcccggtccagacccagcaccccatacggaagggtctgcatcacaaggtaagagcccccatctggccccatctggggggtctggctcacattgcacccagacctctgaaaacctggtgcattggttggcaatcacgttagttttctattcctgccgtaacaaatgataacaaacatggaggcttaaaacaacactcttcttttgtggggtggggaggggggacagagtcttgctctgtcgcccaggctggagtgcagtggcacgatcttggctcactgcaaccttcccctcccggcctcaagtgattcttatgcctcagcctcccaagtagctgggactactggcactcaccaccatggccagctaatttttgtagttttggtaaagggggggtttcactatgttggccaggctggtcttgaactcatgacctcaagtaatctacctgcctcggcctccctaagtgctgggattataggcatgagccaccttcctgggctatctgaagagtttctgaagctcaaatatccagcaggccctgatgtgtctctgcttagagtcttgcaggctgaaatcaaggtgtcatcaggactgtgtttctttctggagaccttaggggaaaagcctttgacctgcttgtcaggtggttggcagaattcatttctctatggttgtggaactgaagtccagcttccttgctgtgggctgaaggtcgttctcagattctcagaggtcacctgcatcctctagcttgtgggcctcttcactgcagaaccagcaatggcaggttaaatccttctctgaagctttgattctgtcttgccacttctgttgcatctctctgacttgtttaccttcctcttctacattttgcttttgttccctaagtgacagtgtcatgctgtgttgtctaggctggacttacagtggcatgatcacagttcactgtattctcaacgtcccaggctcaagcagtcttcctgcctcggcccctcaaatagctgagacttacaggcactaacaggcacttacaggcacttacaggcactaacagcctggctaactgttaaactttttgtagaggccagatttcactatgttgcctaggctggtctccaactcctgggctcaagtgattctcctgcctcggcctcccaaagttttgggattacaggcatgagctaccgtgcctggccctcttttacttttaagggccagtgtgattagattggggctactagataatccaggaaaatctccccttttgtttattttatttatttattttattttagagatagcatgtcactctgttgctgaggctggagtgcactggcccaatcatagctcactacagccttgaactcctgggctcaagcaatccttttatctcagcctcctgagtagctgggaccacagatgtacaacatgcctggctaagtttttttttttttttaaagagacagagtcttgctctgttgcccaggctggggtgcagtggcacaatcaggctctctgcagcctcaccctcctgggctcaagcaatcctcctacctcagcctcctgagtagctgggaacaggcacacgccaccacacccagctgatttttttatttttattttttgtagagatggagtctcagtatgttgcccaagctgccctcgaactccttcagagaatttactgtgctttgtctcaggtgtgcagagcagcacagggttacggtagcacaatcttgggagtcagtgagctggattgaattctgattgttcctgtctatagttctgtgatccagcactgtggacttgtggaacccaaggctctactagaacagggcgatgatgcctttcctccttaggatcttagtattatttttttttcgagacaccgtttcactttgttgccccggctggagtgcagtagtgtgaccttgactcactgcaacctcagcctcctgggttcaagtgattctcgtgcttaagcctccggagtagctggaattacagttgcacaccaccacgcccagctaccttcttaggatcttaaaagatagatgttggtaaaattgtgagcaggacccctagcaagtggtgtgtagttctttttttttttttgagatggagtctaggtctgtcgcccaggctggagtgcagtggcgtgatcttggctcactgcaccctctgcctcccaggttcaggtgattctcctgcctcagcctcctgcctgatgacaggcatgcgccaccatgcccagctaaatttttttttggtatttttagtagagacgggtttcaccatgttggtcaggctggtctcgagctcctgacctcgtggtccatccgcctcggcctcccaaagtgtcgggattacaggcgtgagccaccgcgcctggccactggtgtgtagttcttaaagagcagttatcactgttccctgccttgtggtgtcatcggatgtgtccccctcgctccaactgagctgtacagcgagtgacccaggctgggactgacccctgctgagaagtaccaggcggtcttgtccctctgcctgaagcccagacagtgctctcaagcataactgatgtctcgctcatcagatcctcctggccaacttcttggcccagacagaggccctgatgaggggaaaatcgacggaggaggcccgaaaggagctccaggctgcgggcaagagtccagaggaccttgagaggctgctgccacataaggtcagcacttctgcatttggctttggggtgcatgctggagttggaggtgtgaagctatggcaccaggcaggggcttggggcgtgcctggcttgtcctacagaatgggagggcctgtcctcacagacctgcacgtctcagcctctggggcagggtgtgcttcccttcaaggggtttagggatcaggactctcttggagacattccttggtgttttctgcaggtctttgaaggaaatcgcccaaccaactctattgtgttcaccaagctcacaccattcatgcttggagccttggtcggtgagtgagtaggggaaaggtcctggcttggggtaggttggaatgggcttgtggagccctgatgtgccctgtctgtcacttctgcagccatgtatgagcacaagatcttcgttcagggcatcatctgggacatcaacagctttgaccagtgggggtgagttgctcacttaggggagggccgggaatacctttgtgtcggctcagggatttcagtagcaacgttagagccttcctcataccactcttcccttcccttcccttcttggcagagtggagctgggaaagcagctggctaagaaaatagagcctgagcttgatggcagtgctcaagtgacctctcacgacgcttctaccaatgggctcatcaacttcatcaagcagcagcgcgaggccagagtccaataaactcgtgctcatctgcagcctcctctgtgactcccctttctcttctcgtccctcctccccggagccggcactgcatgttcctggacaccacccagagcaccctctggttgtgggcttggaccacgagcccttagcagggaaggctggtctcccccagcctaacccccagcccctccatgtctatgctccctctgtgttagaattggctgaagtgtttttgtgcagctgacttttctgacccatgttcacgttgttcacatcccatgtagaaaaataaagatgccacggaggaggttgtaggctcagcctctgattttttttttcctgtgatggtgctttatgtagcagagggcaggagcgctcagcaggacgcaggctgtgcctctgcggacacttaacactaagtggtgagcgggtctagagtggagcaaggtgccctgagaagacaatagtggggtgggggcacaatcagtcaggacggcaacttggcctgtgtcaccaaatcccaagactgttttccactcctcacctctgtgactgcagaaattggatactctgttcactcgatggttctaaaaactgcattgagattatgtttgtttcgggtgaattcctggacaagaccgaggatgactgccatctcctggcaagacgctcaggtagttcttttgctttaaaaggcagatattgaaaactggaattttttttttttgagtctcgctctgtcacccagactggagtgcagtggtgcaatctcggctcactgcaacctccgcctcccgggttcaagctattctcctgcctcagcctcccgagtagctgggattacacggcgcacaccaccatacccagctaatttttgtatttttagtagtgaaggggttttaccatgttgggcaggctggtcttgaactcctgacctcaggtgatctgcccgcctcagcctcccacagtgctgggattacaggtatgagccaccacgcccggcccattttttttttttttttgacaacttttttttttttttgagacagggtcttgttccattgcccagactggagtgcagtggcatgatcacagctcactgcagccagtaatcctcttgcctcagcctcccaagtagttgagactacaggttgtaccactatgccctgctagttttttcattttttgtagagagacgggtcttttttttttttgagacggagtctcgctctgtcgcccaagctggagtgcagtagcacggtctcagctcattgcaagctccgcctcccaggttcacgccattctcctgcctcagactcctgtgtagctgggagtacaggcacctgccaccatgcccggctaattttttatatatttttttagcagagacagtgtctcactgtgttagtcaggatggtctcgatctcctgacctcgtgatccgcccgcctcagcctcccaaagtgctgggattacaggcgtgagccaccgcgcccagcaaggcgggtcttgctgtgtttcccagactagactggtcttgaattccagggctcaagagatctcccacctcagcctcccacagtgctgggattacaggcgtgagccgccacacccagcctattcaaaatttttttttcttagagacagggtctttgttgcccaggctggactgcagtgatacaatcatagctgactgaagcctcaaattcccaggctaaggtgatcttctcacctcagccttccaagtagctgggtccgcagatgcatgccagtacacccagctcatttaaaaaaaaatttttttcttttttgagagtcttgctttgttgcccaggctggagtgcagtggtgtgatctcggctcactgcaagctccacctcccggcttcacgccattctcctgcctcagcctcccgagtagctgggactacaggtgcccgccaccacacccggctaattttttgtatttttagtagagacggggtttcaccgtgttagccaggatggtcttgatctcctgacctcatgatccgcctgctttggcctcccaaagtgctgggattacaggcgtgagtcaccgcgcccggctcattttaaaatttttgtagatcagtgtactgttgtaaaaaaaaaaaaataagaaaaataaaaaataaatttttgtagtgataggatcccactgaggccagagaatagggtctggagacaaaggagcattcacttcagcctctgactggtggcaggccaagtctttatttacatagggtgtaaccaaataggaaacctctaaagggtacttaaaccccagattttctacacagggcacttgcttgagcctcatcccgctttctggaatgtacttttgcttcaataaatctgtgcttttgttccttcttttgttgctttgtgtgttttgtccacctctttgttcaatattccaagaacctggacgacttgtagtcaagatcctcccctggtaatactactgtgttgcccaggcttatcttcaactcctgggcttaagagatcctcctgccttggcctccgaaagtgttgggattacaggcgcaagccactgtgcccagcatcacagggccttttaaagctatcaggatgaagtgtggtaaaaaaaggagtaaatgggtttcatctccagatccttgctgggctagagccaaacctcacaaaggctggtgcttcctcctttgaggtgtaaatccttgaaaacattcatttcttttgcataccacgttatgaatcctaaaataatgtttttgcagcctgcatttttaaaaagtcaggtttattggggtgtgatttacatatagtaagattcacctttctttggtatacagttatgagttttcacaagtgtatatacagtcttagaaccattacagatgagatatacagcattttcctcaccctcaaaagttcctgacacttgtggtccagtcctactccctcatcccaactcctgactaccattgaactgatttttttccctccgaagttctgcgtttaccagaatggcgccttttgtgtctggcttcttcccatgatgcttttgaaattcacccatgttgtgctgcaggaattgaaaaaactgtattgtgtggctgggcgcggtggctcacacctgtaatactaacactttgggaggccgaggtgggcagatcacttgatttcaggagctcgaaaccagcctggccaacatggtgaaaccccgtctctactaaaaatacaaaaaaggccgggcatggtggctcacgcctgtaatcccagcactttgggaggccaaggtgggcggatcacctgaggttgggagttcgagaccagcctgaccaacatggagaaaccccatctctattaaaaatacaaaattagccaggcatggtggcacatgcctgtaatctcagctactcgggaggctaaggcagaagaatcgcttgaacctgggaggcagaggttgcagtgagctgggatcacgccagtgcactccagcctgggcgacaagagcgaaactccgtctaaaaaaaaaaaaaaaaaaaaagccgggcgccgggcgtggtggtgggcgtctgtaaccccagctactgggtggggctgaggcaggagaatcacttgaacctgggaggctgagatgcagtgagatggcgccactgcacttcagcctgggcgacccagcaagactctgtctcaaaaacaaaacaaaacaaaacaaaaataaaaactgaaaaatctcaaacatataaaacccaaatagaataaatctccatgtgcctggcaccaaatttcaacaattatcaactcatggtcaatcttactgtatttacaccccaccaccttaattatgtagtagcaaatcggaggtatttcatctataagcattttggtgtgtttctctaaaaattaaaaactttaactttttaaaaaactttattgttcttgttaatgactgataataccattatcccacctaaaatttttattttccgggaaggcttttttctggtggctcacacctgtaatcgcaacactttgggaggcggaggcgggaggatcgcttgaaccccaggagttcaagaccagtgtgggcaatatagcaagtcctcgtctcaggaaaaaaaggaaaaaagaaagttagctttttggcaaaactacttcctagtagatggtgtgtacttcctatcacagcgcattaaggggcacataatgcctgggactccgggatttcgagcccctgacgccagcggcgcctctgtggctctgggacctgagcgcacgcgccttaaagccacgcctccgcatcggatcctagtaagggagcggggttatcattttagcgtagcgttgcgcgtgcgcagagaggccgccgtagtttgcgttttcacctggtcgcccggcggccatggcggccgttctgaagccggtgctgctgggccttcgagatgcgccggtgcacggcagccccacagggccgggtgcctggactgctagcaagctgggcggcattccggtgagggcgggtgccggagctggggtcgatgggtgctgctgaagggtgcggagggagtgggcgaggtcctggggggagtcggggtctgagcgcctcctctgtcccctcaggatgctctgcccaccgtggctgcgcccaggcccgtgtgtcagcgctgcgggcagccgctcgctctggtcgtgcaggtgtattgcccgctggaaggctccccgtttcaccgtctgctgcacgtgttcgcgtgcgcctgccccggctgtagcaccggcggtgcgcgcaggtaggcggggaagtcccagagctgctccaggggtgtcctttccagcgggctggggcgggccggcgggctggagtcggggtgcagccctcacggccctttgtcttcaccccgaagctggaaggtgttccgctcccagtgcctgcaggtgccagagagagaggcgcaggacgctcaggtaaaggttgtgattggcatgttattgtttttctgtcatttgaggatattttccagagaatagtttggggcagactttaaagccgtgttctttgaagtacactggagtgttttttgcttttctgaagaaccataaaatgctattttcgtaaagtttttttttttttttttttttgagacggagtttcgctctgtcgcccaggctggagtgcaatggcgcgatctcggctcaccgcaacctccgcctcccaggttcaagcgattctcctgcctcagcctccctagtagctgggattacaggcatatgccaccacgcccggctaattttgtatttttaatagagacggggtttcgccatggtggtcaggctggtctcgaactgccgacctcaggtgatccacccgcctcggcctcccaaagtgctgggattacaggcatgagccaccgcgcccggcctttcttaaggttttgtgagagttttttttttcttctattttactttatttttattttctaactcctttgttaaaaggagatggaggcccagcatggtggctcacgcctgtgatcccaccgttttttgagaggctgaagtgggaggattgcttgagctcagaagttggagaccaggctgggcgcggtggcttacgcctgtaatcccagcactttgggaggccgaggcgggcggatctcctgaggtcagaagttcgagaccagcctggccaacatggcgaaaccccgtctctattaaaaacaaaaacaaaaaattagccgggcatggtggcagacacctgtaatcccagctacaagggaggttgaggcaggagaatcgcttgaacccgggagacagagattgcagtgagctgagatcatgccactgcactccagcgtgggtgacagactccgtaaaaacaaaacaaaacaaaacaaaagaaaaaaaaaacgttgggagagcagtctgggcaacatagcaaaacatcgtctctataaaaagtaaacaaattagccaggcatgatggccacgcaactgtagtgccagctactcaggaggctgaggtaggaggattgcttgagtctaggaggttgaggctgcagtgacctacacttgtgccactgcactccggcctgggccacaaagccagaccctgtcccctgccaaaaaaacaaaagggagatggagacttcctcctggatttcttcaacttttttttttaactgtaaattgacagtttataataatgtataaatttatgaggtataaagtgatggctatgattcatgaatatcatgtggaataattaaatgaagctagttaatgcattcatcacctcaaatacttaacatcttgtgagaacatttgaaatttcctctagcaatttggagatacacaatactcttatttttttttttttttgagacggagtcttgctctgttgcccaggctggagtgcagtggcgccgtctctgctcactgcaagctccacctcctgggttcacaccattctgcctcagcctccagagtagctgggaccacaggcgcccgccaccacggccagctaattttttcatttttttaaatttttagtagagacagggtttcaccatgttagccaggatggtattgatctcgtgaccttgtcatccacccacctcggcctcccaaagtgctgggattacaggcttgagcccctgtgcccagccacaatactctattattaactatattcatgctgtgcagtagaacttaaaaaaaacccacattcctcctgaataactgaggttttgtattctttgaccgtcatctccttattcttcccgctccaggtttctttcttcctttttttttttttttttttttttgagaccgagtttcgctcttgttgcccatgctggagtgcaatggcacaatctcagctcactgcaacctccacctcccggatgcaagcgcttatcctgcctgcctcagcctccctagtagctgggattacaggcactcgccaccacgcccagctaatttttatatttttagtagagaaagggtttcaccatgttggccaggctggtcttgaactcctgacctcaggcaacccacccgcctcggcctcccaaagtgctgggattacaggcgtgagccaccatgcccggctcactccagatttttttttttctttgagatggagtttcgctttgttgccaggccggagtgcagtagcacaatcttggctcactgcagcctccgcctcccaggttcgagcaattctcctgcctcagcctcctgagtacctgggactacaggcacacaccaccatgcccagctaatttttgtatttttagtagagatggggtttcaccgtgtagccaggatggtgtcgatctctttacctcgtgatccacccgccttggcttcctgaggtgctgggattacaggcgtgagccaccacacctggccactccagatttctttaaccaccactctactctctacttctttgaggttgttttagattccacatataagtgaatacatgcagcatttgtctttgtgtctggcttatttcccttagcaaaatgttctccagttccatccatgttgtcacaaatgacagaatttcctttttttttttaagggtgaaaaatattccattgtatatatagtagtttttttaaacttacactgaaggtcttgagacacacagtttactgattttcctgtttgggaatatatatgggtgtgtacatatatgtggttgtatgtgataatgtatacgtgtctttatagtaaatatactttatgagagctatatatgtattaacacatttcataagatgaaatctgaatttattgaaaaggcaggcaagttggtagctgcagaacacaatttagcctccctttgactgtaaatgtgtctttatatatacactgagtttgtttgtttgtttgtttgttttttgagatggggttgcattctggtcacccaggctggagtgcagtggcatgatctctgcctcttgggcccaagccattctcccacgtcagcctcctgagtagatgggattacaggcacgtgccaccatgcccagctgattttcatattttttgtatagatgggattttgtcatgttgcccaggctgttcttgaactcctggactcaaacagtccgcccacctcaacctcccaaaatgctgggattacaggcgtgagacactgggcccggcctgcacccagttcttgatgtttgctaggcatagtattagcagtacttaaataaaaagttgaagacagtggtgtttgcctatatttgtcagggttcaggtgcagataattagaaaagtgctgttgctttttctttttttttttgagaccgagtgtcgctctgtcacccaggctggagtgcagtggtgtgatcttggctcactgcaacctccgcctcccgggttcaagcgattctcctgcctcagcctcctgagtagctggattacgggcacgtgccaccatgcctggcttttaagctgagacagacttaacacaggagtgaggtttttagtaagtggataggctgaaggaggaggctccaggaatgccctccagaatcacacctcagaactggccgtgaaggagctgctatgccacctctcctgctgtcaggaagcttaggtgtgatctggtgaactagaggctgtctttgccaccgaaccgttggctccaaagccttgttctgtctgtgtctacacaatggctaccttttgctatgtggtctttctttctacttcactctgtctcaagttcatgtttctctctagtagacctgattagcagacccctaatcatatctgaaaccctagctgctaaggggtctgggaaaggtagttctttcttttcagttcctgcaatacatgaagcacaacagaaagatattggaacggatggttgaataacccctgtactatatctgtcacactcaccccaaaaaggaaagacaagtattttaagtcacctccaacgtgcttttgagtacatagggtctagaaagtttgattggagtgtaccagaggggaaggggatggtgtgaaggctccctctggaaggcgcggcggtgggtggctggagccgaaggattagaataaacctcccaaatgtgctcggacctcattcactgagtatttttccagaaacagggaaacagccttgcagctgaggactggtgtgaaggtgctgatgactggggaagtgatactgaggaggggccttcaccacagtttaccttggattttgggaatgatgccagcagtgccaaagacgtagactggactgctcggctccaagacctccgcctgcaggatgctgtcctgggtgctgcccatcctgtgcctcctgggctgccgctcttcctgccctactacatctgtgttgcagatgaggatgattacagggactttgtcaacctggatcatgcccacagccttctgagggactatcagcagagagaaggcattgccatggatcagttgctttcccaaaggtgaggatgtgtgctgctgaggttgagaggtgactggattgggaagcagccacaagagttacccttcagtttcaccacaggacctggggaaactttcaggcagaacttgtatgtaggacctttttgcttcacttccttatcagccaacttgagttagcttgaaaaccctgctctatttataattgccgttaagaaagtgaagatgaacaaacagaagttagagatggcaagtatttatagaagacgcgttcactgactcttaaattttcttttatatttctaatatgtctttatagcagagacaggcaagttagaaaactaccatttgatctgggataataagattggggtgaaaaaatggaaaaaggaaaagaaaaacgccatttgtttattgactcttggctgtggctccagaactggcccaggacctcagagatgctttcagatcctcaattctgtaaaatgagagtgatggtgatatctctgttctctgtttcatcccatgattttttgagagttaagcgagagggtagatcttgaaaggctttataaaccaaagctctctaaagaggtaagaatgatcatttttgcttattgattgactgagagagacagggtctcactctgtcacccacgctggagtgaattggtgtgatcaaagctcatgcagccttgaactcctgggctcaggcaatctatcttagtttcccaagtagctgggagtacaggtgcacaccaccatgtctgaccaattaaaattttttgagtttcgctgttgttacccaggctggagtgcaatggcacgatctcggctcactgcaacctccacctctcaggtttaagcagttctcctacctcagcctcccaagtagctgggattatagccatgtgccaccatgcccagctaatttttgtatttttagtagagatggggtttcactatgttggtcaggctggtctcgaactcctgacctcaggtgatccacccacctcagcctcccaaagtgctgggattacaggcgtgagccattgtgcctggcctaaaaatttgttttagccactgcacccagcattttttactattagaataaaaaaattacaatagaatatttggagaaatggcctggttctttaccagaactgtttcatttgtaggctttttcagaataatgatgaaggggaatgcatgaagacatgttggtgtttgaaaataatccttaatagaattgatggttataaggactttttattttttatttatttatttatttatttatttatttatttttgtgtgtgtgtgatatgggctctcttgccaggctggagtgcagtggtgcgatctcggctcactgcaacctccccttcctgggttcaagcaattttcttgcctcagcctcccaagtagctgggactacaggtgcgcgccaccacacccagctaatttttgtattattagtagagacggggtttcaccatgttgaccaggatagtctcaatctcttgacctcgtgatccacctgccttggcctcccaaagtgccgggattacaggtgtgagccaccgcgcccggcaggattttttattttttaatttcttaagtttttatgtatttgcttatttttggtgggtttcttcagactagagtattcttcttttttttttttttttttttagagatgggatcttgctttgtttcccaggctgaactgcagtggtgtggtgtggttatggccttttttttttttttttgagacagtcttgctctgttgcccaggttggagtgcagtggcacgttctcggctcactgcaacctctccctcgccggcttaagcagctctcatgtctcagcctcccgagtagctgggaccataggcgtgcgccacttcacccagctaatttttgtattttctttttagtagagatgggcttttgccatactggccgggctcttcttggagttctggccccacgtgatccgcccacctcgacctcccaaagtgccgggattacaggtattagccaccacgcccagcctgctcatggtttactgcagcctcaaactcctggcctcaggggatcctctggcctcagctttccccatagctgggactacaggtgtgtgccaccaaactcagctaattaaaaaaatttttggtttttttgagacagagtctcactttgtcacccaggctggagtacagcggtgtgataatggctcactgcaacctccagctcccagtttcaaatgatcctcctgcctcagcctcccaagtagctgggattacaggtacccgccaccacacccggttaatttttgtatttttagtagagatggggcttcaccatgttggccaggctggtctcaaactcctaacctcaagtgacccactctccttggcctcccaaagtgctgggattgcaggcgtgagccaccgcacccagatgaaaaatacatatatatatatatatatataaaataaataataaaatatatatattaaaaaatatatatgaaaatatatatatttgagacagaatctcgctctgttgccaggctggagtacagtggctcaatctcagctcattgcaacctccacctcccaggtttaagcaattctcctcccttagcctcctgaatagctaggattacaagtgcataccaccatgcccagctaatttttgtatttttagtagagacagggtttcaccatgttggccaggatggtctcgatcttttgacctcgtgatccacctgcctcggccttccaaagtgttgagattacaggtgtgagccactgtgccctgcgactttttaaattgtaaataattactcaagagttgaaaatggcttgggagaagggttgggcagggaactgcagagctacatgtacacaatttaaatatcaaaaatatttacttgacagtttttggctgagtgcggtggctcactcctataattccagcactttgggaggccgagatggatcacttgaggtcaggagttggagaccagcctggccgacgtggtgaaaccttgtctttactaaaaatacaaaaattagctggacgtgttggcgcacacttgcaatcccagctactcaggaggctgaggcaggagaattgcttgaacccaggaggtggaggttgcagtgagccaagattgcaccattgcactccagcctgggtgacagagggagactccctctcaaaaaaaaaaaaaaattacttgacagttttacagttttttaactttgacagtttttttttttttttctttttgagacagggtctcacactgttatccaggctgtagtgcaatggtgtgctcacggctcaccacagccttgcctctggaatagccgggaccacaggtgcatgccaccatgcccagctaatttttgtatttttttgtagagacaaggttctgccagattgcccaggatggttttgaactcctgagctcaagtgatccgcctgcctcggcctcccaaagtgctgggattacaggcgtgagcccactgcactggcctgagaaatttttttttgagacggagtttcactcttcttgcccaggctggagtgcaatagcgcaatcttggctcactgcaacctccatctcctgggttcaagtgattctcctgcctcagcctcccaaggagctgggattacaggcgcccgccaccacgcctggctaattttttgtacttttattagagatggggtttcaagatgttggccaggctggtttcaagctcctgacctcaggtgatctgctcacctcggcctcccaaagtgctgggattaaaggcgtgattgattttttttttttttttttttttgagatggagtctcattctgtcaccaggctggagtgtagtggcatggcacgatctcggctcactgcaacttccgcttcccgggttcaagcgatttcctctgcctcagcctgctgagtagctgggactataggcgcaagccaccatgcccagccaattttttgcattttttagtagagatggggtttcaccatgttggccaggatggtctcgatctcctgaccttgtgatctgcctgcctcggcctcccaaagtgctgagattacaggcgtgagccactgcgcctgccctgataaaattttttaaaagaaaattatcttgttttgtcttgcaaatgctgtaattttctggatatagacattcaaaagtgttttctgcttctgtttttagccttcctaatgatggtgatgaaaaatatgagaagaccataattaaaagtggagatcagacgttttacaaattcatgaagcgaattgctgcttgtcaggagcagattttgaggtaaaaaaaggcacagttccttttattgttttccttgattataaaggaatacatattagtttggaaaacacaggaaaatatgagaaaagcaaaacctacagtattccccaaaccaagagagaacctaatacctgctttataggacctaatacctactttataggatgtgtaggaggattcagtaaggtaaagtgcactcacttgtctaacaaatacttacgaagtctattctgcatgccagttgctggtatttgtaggtgctgcagatatagcaagaaacggcacagatgaagtccatgttctcatagcctttattattattattatttaatttttttttttctttgagagggagtcgcgctctgtcgcccaggctggagtgtagtggcgtgatcttggctcaatgcaacctccacctcttgggtttaagccattctcctgcctcagcctcccaagtagctgggattacaggtgcccgccaccctgcccagctgatttttttgtattttagtagagatggggtttcaccatgttggccagactggtctcgaactgctggcctcacgtaatctgcccacctcagcctcccaaagttctgagatacaagtgtgagccaccatgcctggcttttttttttttttttttttttttttttgggggcagggtcttgctctgttgctcaggctggagtgcagtggtgtgatcaatcatagctcagtgcaccttgacctcctgggctcaagtgatcctcccacttcagcctcccaagtagctgggactacaggcatgtaccaccatgcccaactaatttttgtatatttttttagaaatggtatttcaccatgttggccaggctggttccaaacttctgggttcaagccatccacctgccttggcttcccagagtttgttctaggattacaggcatgagccactgtgcctggactattattattattaaaaaaatatttttttagagagagggtctcagtctgttgtccaccctggagtgcagtggcgtgatcattgctcactgtaacaactacctcttgggctcaatcgatcctcccaagtagctagaactacaggagtgtgccaccatgtttggctaatttttaaaaaatgtattttgtagagatgggatctgatcatgttgcccagtctgctctcaaactcctggcctcaagtgatcctcctgccacggccttccaaagtgatgggattaccggcatcagccacgacccttggcccatatatttatttttattttttaatttatttttatttttctgggatggagtctcgccctgccacccaggctggagtgcagtgacgtgatcctggctcactgcaatctccgcctcccaagtttaagagtctcctgcctcagcctcccgagtatctaggattacagcgccaccacgcctgactactttttgtatttttagtggagacggagttttaccatgttggtcaggctggtatcgaactcctgacttcaaatgatctgcccgcttcagcctcccaaagtgctggagttacaggcttgagccactgtgactagtgggggagattaaaaacaaacctgtatgattcccataagtgataaatgaggaaaaaatagagctattttaggtaggctatcagaaaggcctcagaggaaatgacatacccagcaggtataatttataaaaatagccacatagtaaaaacaggtccagacaaagtgggcagaattagctcaaatggtctttttccccgatacctaccacagtgaatctaaaagctaaaaatcaggccaaataaaataaatattaaaaaagaaattcccttgtatcagcactgaacaaaggaaaagggcttagtaccataaaactcaaagtgatagcccaggatataatatccataaatgtctagtagagttcttgagtgtttaacatatatatttattcacttatgtaactaagttatctttgcagagaaaggtacagaaatttccggcatggttaagtgcaagttctaattccacaggccttttctctcacctgcctaaaatatactgatgagtccacaaagaattttcttttttcggaaacggaatctgtctctgtcccccaggctggagagcaatggtacgatctcagctcactgcaacctccattttctgggttcaagcaattctcctgtctcagcctcctgagtagctgggactacaggcatgtgccaacatacccggctaatttttgtatttttattagagatgaggtttcaccatgttggccaggatggtctcgaactcccgacttctggtgatccacccacctcagcctctgaaagtgctgggatggcaggtgtgagccaccatgcccggcctaagaattttcagttaataatattatgtctggaaggaagcacacaggaggagagtttgcatctcctaatgtggaggatggtggacccagctgttggctgaagaactgggtgtggtggggaggtggtgtaggaaaggacggggattgcctctcagaagcaacattcctttgttccatgagtcagagcaatgattggaaagttaagagcaatttcgcctccattcgagtgggatctttctcaacatacagcattttacactgtctcagaggaaaaagcaaagcccaggtattctaataaagattgcatccagtcccagaagaactatctcctcaccccagtttcctcttttaccacctacagaaatgtagaggaaatggacagtactcttagagagaggaaaacaggcctcatatgagatggacaggaaatcaatgagaacctctgcagacatttcagagcaaatagatggtcttaactgagttgccccctttaggtgtgagctagatgaaaaatagcatgccacccaggtaatcatactgtggcaagaacagttaaggaaatgaagagaacatagaaaaggctcaagaaccaagtctgccagaaaatataatccagctggactcggtggctcacgccagtaatcccaacactttgggaggccgaggcgggtggatcacgaggtcagtagatcgagaccattccagccaacatggtgaaaccctgtctctactaaaaatacaaaaattagccgggcgtggtggtgggtgcctatagtcccagctgttcaggagactaaggcaggagaatcgcttgaacctgggaggtggaggttgcaatcagccgagatcgtgccactgcactccagcctgggtgacagagtgagactctgtctcaaaaaataaaataaaataaaatataatccaaggagcacatcagtcccagcagatgcttcaaaatgtataagaacttcataagaatggattccataaaacaagagctcaaaggtgagaaaataaagtaactatgtatgaatcggaaattgaattgctaaagaaaccaagccccatgacattacatatctaatacatatagaatataaggaacactggccgggtgtggtggcttaagcctgtaatcccagcactttgggaggccaaggcaggcagatcacaaagtcaggagttccagatcagcctggccaatatggtgaaaccctgtctctactaaaaatacaaaaattagctgggtgtggtggcgggtgcctgtagtcccagctattcgggaggctgaggcagaagaattgcttgaacctggcaggcggaggttgcagtcgaccgagactgcgccattgcactccagcctgggcgagagagcaaggctttgtctcaaaaaaaaaaagaaaaaaaaagttaaggaacataatagacttggctaaagatcaaagtactggtatagaggaaagacttgagctaatccagtgaatgcagaagaaaaagagaaagcattcagagagaagatggtatctttgaagggttgataaatatatttactatgaggagaattggtgtccaaaatagagaacgcaatagatggatcagaaactattcaaagataaaattgggaatttttccttaatgaaataagaactaaatatgcaaatactaaaatacagggagtataagaatagttgacattgagaaacctagcctggtggtggttttaaaaatatcgtcagtcttttaaatgtagccattctagtaggtggtggtggtggtatttccttgtggtttgaatttgcattttcctaataacaaatgatgttgtgcatctttccatatactcatttgacatctgtgtatcttctgtagtgaagtgtgtctgtttacatttatttttcagcagctttattgagatacaattgacatacaacagactgcgtatatttttacagtgtgcactttgataagttgacatccatatacacccctgaaatcacaacagtcaagacagtaaacatattcctctctgccaggagtttcctcatacttcttcgcaagttcttgcctaccctgtcctgtgctgctcccctagtccccaggcaaccgccaatcatctttctgttgcaccttagtgcatttcctgtgaaagtatataaggtcatatgggatatactttttttttttggtctggttttattcacttagaatacttcaagattcattcttattgcatgtatcaatagttcattccttttgaccgctgtgtcgtattccattgtatggatgtgccactatacatttaccagttgatggatatttgggttatttccagtgtttggctattataaataaagctgctgtgaacatttgtttacatctctttgtaagacatgttctgattttgggggggtagatacctaggaatagaacggttgtattatatgggatatgcatgtttaacttgttaagaaacaggccagttttccaaagtggttatgccatttctattcccactagcagtttttaagaattctacttcctgtatatctttgctaatgcttgggatgttcagtttttaattttagccatttaagaaggtgtgtagtggcattttattgtggctttaatttgcatttccccaaatggcaaatgatgttgagcatcatttcaagtgcttgttttccatctctgtatatcatcttggataatgtgtcattcaaatctctcaccatattgtttgtgttactgagttgtaggaattcttcatatggtcaagagtacaagtcctttttcaatttaattttttttagcactcaaacagattctgacagatggctttaaattttgatcaagttcaacttaacagttatggtttttttaacacggaatatgcagtccctttaatgtaatcattggtattgttgggttaattgttttttgttttttgttttttttttcttgagacggagtcttgctctgttgcccaggctggagtgcagtggcacgatcttggctcactgcaacctctgcctcccaggttcaacgattctcctgcctcagcctcctgagtagctgggattactggtgcgcaccaccatgcctggctaattttttgtagtagagacaggtttcgctatgttggccaggctggtatcaaacttttgacctcaggtgacccgcctgccttggcctcccaaaatgctgggattacaggcatgagccaccgcaccccaccatgttgggttaattttattctgttattgttttttcctccatttccttttttttttttttaaagagatgggtgtctcactatgtggcctaggctggtcttgaactcctggactcaagcagttccctcacctcagcctctcagcttctcaaagtgctagggttataggcatctgtcaccacacctgactttccatttggtggggtttttttgtttttgtctctgtattccttttatttaacctgcttgtcagtgactttgagtatttttagtttactattttgttccttttttgtcttttatttttaactctttatgttgctttttttttttttttttttttaagagattgggtcttgttctgttgcttgcgtaggctggaatgcagtggtgcagtcatggctcaccgcagcctcagactcctgagctcaagtgatcctcctgccacactctccaaagtagctgggaccacaggcgtgcaccactatgtctggctaatttttgtattattacactatgtctggctaatttttgtattattattattattcgagacagagtcttgctctatcatccaggctggagtgcagtggagcaatctcagttcactgcaacctctgcctcccaggtttaagcgattctgcagccgcggcctcagcctcccccacagctgggattacaggcacctgccactacgcccggctaatttttgtagttttagtggagatggggtttcaccatgttggccaagctgatctcgaactcctgtcctcgagtgattcacccgcctcagcctcccaaagtgctgagattacaggcctgagccacggtacccggcctaccttgtccactaggttttttttttggttttttttttttacatattcattactggtattttaaagtttttgtctgataaatttatcatcttgtccatgggtctccttgcattaactttctttatggggtaaattttcctgcttctttgcatgtttagtaacttttaaaatgatttaccagaaattacatatcgaacaacagtaatattgaagtgagctggatgtggtggctcacacctgtaatcacagcactttgggaggctgaggtgggaggatcacttgaggccaggagtttgagaccagtctgggcattatagcaagaccctgtctctacaaattttttttttaaaaactagctgggtatggtgatgcgcctctgtgttcccagctactcaggaggctgaggtaagaggattgcttgagcccagggggtcaaggctgcagtgagctgtgattgtgccactgcactccagcctgggcaacagaaaaaggctttatctaaaaaaaaaaaaaaaaaacccaaaaactgaagtgaatgtttcctccctctaaggcagaggtccccaacctttttggcatcagggactggttcatggaaggcaattttttcacagactgaggtgggggatgtggggcatggttttgggatgaaactgttcacctcagatcataaggctttagattctcagaaggagcacacaacctagatcccttgcatgtgcagttcacaataggatttgcgctcctatgagaatctaatgctgctgatacgacgggaggtggagatcaggtggtaatgctcgcttggctgttgctcacctcctgctgcatggccctattcctaataggctaccaaccagtactggtccatggcctgggggtccatggcctgggggttggggacttcttctctaaggcatgccctttcctctgtaaggccagtgatgtggagggctgattccatttaatctgcagtggagctgagtctggactttgttgcagctttacctagattcagttgaacattgactttagtgcctttgagactttgaatcgaacactgacaagatttccagatatcttgctatgctttacagccatggtgctaggtttttgggcctctgggagatttctgcaagaaacaaagaaaggttgcaaagcatggccttagatgctagaatgcgacttgtgtggctctgattcggggttctttgtttccttgtcctaggtattcctggagtggagagccactctttttgacctgccctacatcagaagtcaccgagctcccagcctgcagccagtgtggaggccaaaggatatttgagtttcagcttatgccagcactggtcagcatgctcaagagtgctaatttaggtgagaagccctttattaatttgagtttgtggatttctggcattatttttaaataaatgaaaaaccttttgtttacttataaaatatcataagcaaattacagaaaatttgggaattaaaaaattattttaagaaatttaggccaggtgtggtggctcatgcctgtaatcccagcactttgggaggccaaggcgggtggatcacaaggtcaggagatcgaggccatcctggccaatgtggtgaaaccctgtctctactataatataaaaaattagctgggcgtggtggcacgtgcctgtagtcccagctccttgggaggttgaggcagggaatcgcttgaacccaggaggtagaggttgcagtgagccaagatcgcaccactctactccagcctggcgacagagtgaggagactctgtctcaaaaaaaaaaaaagaaatttataatccagccagtcttttttttttttttttaatatttattgattgatttatttattgagatggagtctctctctgtcgcccaggctggagtgcagtggcacgttcttggctcactgcaacctccagctcccggggtctagcaattcccctccctcagcctccctagtagctgggattacaggtgcccgccaccacgcccggctagtttttgtatttttagtagtgatagggtttcactgtgttggccaggatggaatttttgtattttttgtagagacaaggttgcgtcatgttgcccaggctggtctcgaactcctagactcaagcgatcctcccgccttggcctcccaaagtgattacaagcatgaaccatgcctggccagaaattaaaactattatcaatgttaataaccattattccaacaatcatttttgacataaagacaaatagcaagtcagatgaatgtatggatggctagacgaaaataattttcctaaaataggaaaattcactaatatggtaattaaaagtcttagaacaaatttttgtacaaattaacagaaggaatgttaagtataagtgaagcagttactggatttttttttttttccttcttttttcttgagacggagtcttgctctgtcgcccaggctggagtgcagtggcataatctcagctcactgcaagctccgcctcccgggttcatgccattctcctgcctcagcctcccaaggagctgggactacaggcgcccgcaaccaagcccagctaatttttttttgtatttttagtagagacggggtttcactgtgttagccaggatggtgttgatctcctgaccttgtgatccgcccacctcagcctcccaaagtgctgggattacaggcgtgagctgccacgcctggcctggacttttggtaataggttctttacctaagaggcccaagtttctgaaaggtgcttctgctattaacagaaaataacattctttctgtgtttcagttttagatagtatgcatctggctccttaccatagtagataaggaaatttataccctattcctaccttgaaatatttcagtatcttttttgttttttgagacggagtttcacccaggttggagtgcaatggtgctatctcggctcactgcaacctctgcctcccaggttcaagtgattctcctgcctcagcctcctgagtagctgggattacaggtgcccaccaccacacccagctaattttttatatttttggtagaaacaggtttcactgttgttggccaggctggtctcaaactcctgacctcaagctcccgacctgcctcggcatcccaaagtgcttggattataggcatgagccaccgtgcctggacccagtatctttttttttttttttttttttgagatggagcctcactctgtcgcccagcctggagtacagtggcactatctcggctcattgcaacctctgcctcccaggttcaagcgattctcctgcctcagcctcttgagtagctgggattacaggcgcccaccaccacgccctgctaatgttgtatttttaatagagacggggtttcgccatgttggctggtcttgaactcctgacctcaagtgatccgtccacctcgacctcccaaagtgctgggatttacaggcatgagccaccgcgcctggccagtatcataattatcacagctatttggatagccttagttctatgtgtaaatggattcagtgtttatcaccactcttagagtgagcttttttattcctgttttattttgattctttttgcagtagctggattttctcaagtaatagctttaaggagggctcagaggtatcttgcttcagattgtgcatggtaatgtggcttcatatttgaggggcaacccatgtataaaatttttaaatcccactttctcttttcagaaccttgtatagacccctgtgttgtcttctgacagtgaaagccctgccagccctttgccctggtgcctcctgtcatttcttggtggttcagtctcactgggaaatatatttttctggaagggcttatgggcattctagtctctgagatttttcactcatatagaaatgtcttttgcatggaatgtagctttgtagaggtatgagggtggtctgattttttccccctttgtgactaacatttttgccacaatactgttagcagcggtgaatctgtaggggtctgtagcaacctcagttcttgcctcctccgaagaaagaatttgaccgaggcacataagacagaggagagaccgaagcaaattttagagcaggagtgaaaacttactaaaaagttttagagcaagaacgaaaggaagtaaatatagttggaagagggccaagcaggcaacctgagagattcaagtgtccatttgacctttgacttggggttttatacttcctgggtcttgggttacttctcttgtttcttcccttggggtgggctgtccacatgcatagtggccctccagcacttgggagaggccgcatgcgcagtgtgtttactggagttgtagacttgctcacttgaggcgcttttcccttaccagtcagatgctcctagaggaatgtcatataccagttaaactctgccattttttcatttttttttttttttttgagacagagtctcactctgttgcccaggctggagtgcagtggcacaatctcttctcactgcaacctgtgcctcccaggttcaagcaattctcctgcctcagcctcccaagtagctgggattacaggtgcctaccaccacgcccagctaattttttgtattgttagtagagacggggtttcaccatgttggccaggctggtcttgaactcctgacctcaggtgatccatataccacagcctcccaatgtgctgggattacaagcatgagccaatgtgctgtgcccagccaatgcatacatttttaaacaatgtatttctcctttgctgctgcaaatcattgcctacgtcatcctcttgactcctgcttttctgttctaatatcaggagttcttattgcttatgttttcttggtatctttttttaatggctttattcattgataattttctgtaaactcttagggtttattttatattttttgcctgaatccttatcctttctcggcagtagtgtgtcctatgatatatatttctctcttctttttttttttttttttaagacagggtctcgctctatcacccgggccagagtacggtggtgcaatcatagcttattgcagcctttatctcctgggctcaagtgatccttctgccttagtctcctctgagtagctgggactacaggtgtgcaccgttacacccagtgaatttttttttttttagtaaagtctcactgtgttgcccaggctatatgagatatatatatattttgtttgtttgtttgtttgttttgttttttgtagagacaggtgtctcactatgttgcctaggctgggctcaagctgtccttccccgtcggcctcccaaagtgcagggatcacagttgtgagccaccgcacctagccaaaagctatgtatatcacatgaaccatgtagattaatatagattttcaacatcagatagctagacagttataatgaacacttgctgaaatttttgtttatttttaaagtatattttcctgccactttaaattaattttgcttttttgttatcaatattcacttattataggatagactgtgattctgttatagctgaaagcagtaagcactgtttttgctttacctaattactttttcagcttataaggtaaaatcattccttttagtaacatcagtctcataactctttttgctggaagcctgaatatgtggtatttttcaggtctttctgtggaatttggaacaattctagtttacacatgtgagaagagttgctggcccccaaatcatcagactcccatggaagaattttgtattatacaagaagacccagatgaattattgtttaagtagagcatttccttttattaatataaattaaaacaaatgtttacatccaaatatgtttgtatgtaccttattttaactcacaagttattaacctctgtttttctgagttgcctttttgcctttgggtgctggtgccggggccggggccgggccaggacctcctgactgtgggttggtctgcccttccagggtccagggccagctgtcacagtggcagctaggaaggtagctcctctctagtccagagggctggtgttgtctgcacagccgttctggtgggcattctaggggggaggagagcagcgaaagagccaagagcagtggtcagcctcttgtgtacacctctgacacgtgcactccagtgcttcctatgctgtttctggcacctgatcaagccactgaacctgctctagctgctggaggtttttgctctgtgaccctggctgtttagacctgcccatgttcatcagcccaggtccccgccctcacccactcccatcttctgctcctgcagtatcccaggaaggggtctttactccgttctggagactgtccctttatccagctgccttccagtcttcccctttctttatttttaacatgatcaaccccttcccttcagccccataacagcagtataaaaacactcccagccatgttcagacatgctctgcctacgtagatgaggataatgaggcctaggtgatcatggggtgggcttgtttcttgcatttaacattatatttggagcattttcccattaatatttttcccacaacataatttataattgctctattttttaaatatacatcaaaagctttatacaatttttagccacttgtattttccaatttttattcccatgatggccatccctgtaactaaatttatatatattttaaatcaatgataactgctacaggacagtttcctagaattggaatgaatgagtcaaaagttgtgcacaattttagggtttttttttcttttttttcgagacagggtcttgctctgtctctcaggctggagtgcagtggtaagggcatagctcactgcagcctcgacctctcaggcttaagtgatcctcctgcctcagcctcctgagtagctgggactacaggtgcaagccaccacgccctctagagaagctttgctttggaatctttacctggagtgtgttggagtgcttgtttcccaatcccttgataagtgttacttattttttctttctaccagtttagtaggtgaaaaacttttttttttttttgagacagagtctcgctgtattgctcaggctggagtgcagtggtgcaacctccgcctcctgggttcaagcaattctcctgcctcagcctcctgagtagctggggctacaggcttgtgccaccacccccagctgtttcggtgtttttttttgtttgtttgtttgtttgtttttttgagacggagtctgttgcccaggctggagtgcagtggcgcgatctcggctcactgcaacctctgcctcctgggttcaaacgattctcctgcctcagcctcccgagtagctgggattacaggcgcacgccaccacgcccggctaatttttgtatttttagtagagatgggggtttcaccatgttagtcaggctggtttcagaactcctgacctcgtgatccacccgcctcggcctcccaaagtgctgggattacaggcgtaagccaccgcgcccggcaggtgaaaatcttaccattttgcatggtttacatttttttcttttttgagacggagtcttgctctgttacccagcctggagtgaagtggtgcgatcttggttcactgcaacctccacctccagggttcaagcgattcttttatggtttacattttaatacgcttattgatcatattgtccaattttttgtgagtttcctgttcacatcctttgcctatatttttttgggggtgacacttgttaatttgtaagagctctttacgtatagggacatcagttttctaacctgtaaggaagtcttggctgggagttgaaaccccaggctagaaggcgacccttagactttttaggtctgatggcgggcctatgctggtgtgggaataacaccgccggtctcagctggaggtcgccagccctttgcaagagcctgccggtccccgcgggctgcagcacaccccggcgcgatgtgccctgcctgtgtctgccggaggctgtagtgcgcaggagcggaaaccaggccgcccttcccccacccgcttccggccgcggctcggttctcccgcctccgcctccgccgcggctcgtggttgtcccgccatggcactgtcgcgggggctgccccgggagctggctgaggcggtggccgggggccgggtgctggtggtgggggcgggcggcatcggctgcgagctcctcaagaatctcgtgctcaccggtttctcccacatcgacctggtgagggccgggcgcgcgcgcgtgaatggcgggctgtggtgcgggggctgggattcgggggttccggggctccaggggctctgaggctcagggcccggagcccgggaccggagttgcggagcgggggcaggctgagaggctcgggttgtgccccccccgcgggaggagactgttctttgggcacggggcgggcctccgctcgctgggccggctccggacgccgaggaggccgcgggcccccgcctccccggcagcgccaatgtgtggcgcttcgtgggcgtgaagccgcctcttatcctcccttcaaaacaaattcccggctgttaggagatgcgggagaggattgagtccctcgcggatgttgtgactttaattttgaggtccctgtcgtaactccgaagtaacgacgcggggcggaggatggcaatgatagcgaccaacgcgtcccgagcgctggtcacgagcgggtttacacacggaacgcgcaccatcttcataccacccgaggagtgcaaacgctatttccaccctgctttatttttaacagatgaggaaagggagacgcaatggggttgagtaacttaccctgggtcacggagcgagtggcagggctcccgcaggctgcgtgactgtcattgctctcacagtagacggtacactcgcttgtttcattaaagacgttaggactgtgccttttgcattggtgtacgttgacaagccagtgctattttgaatcgttatttctactaatgcaaactttttagagattggagatgttactggcccttcggtgtgagtttaaagtgtcttaagggctagtggaaacatggaatgaacaaaaaagtacgggtggccgactgagtcattgtttctttcctttatgtattatatatttaagcaaaaattagataaaacttaaaacatgatacttttttaaccatgtgtaaaagtttcctttcacagttctcaggttaatagtaaatgaaattgtgtatggatgaaggcttgaattaagggaggcagcaaaaattcaataaacgtttgccatgtatcatttaagaaaaagaacagaacctgggcaacatagagaaaccccgtctctacaaaaaaagaaaattagcggggcgtggtggtgtgcgcctgtggtcccagctacccgggaggctgtgtcaggaggatcgcttgagcctgggaggtcgaggctgcagtgagctgtgtttgcaccactgcactccagcctgggcaacagagggagaccctgtctcaaaaaacaaagaaaaagaacagggcatagttaaatttaatattttgtacttgaaagagtaattcgattgaaagagaaatactttagtattttttgagacagggtctggccctgtcaccctggctagagtgcagtggcccgatctcggctcactgcaacctccgcctcccaggctccagtgatcctccacctcagcctcccgagtagctgtgactacaggcatgtgccacctaattttattttttctatttcttgtagccaccagggtctcactattttgcttaggctggtcttgaaggtctgggctcaagcgattctctcactttgtcctcccaaagtgttgggattacaggtatgagccaccactcccggtgtagagaaatatgttaatatattttcagttagtgtttacctcgacagcacatatagttttaatgaattcacatatttttatggcatccagggagtttcctgaaatattttccaggatgattaaacaaacaaaatataccattctttcaaagtatttttgagaagtttatctctgacattaaatctagattcttacatgcattaaattattctttatcagtttaacaattttggtatggcgattcgaaaaacgctttctccactaatgtagcagatatcaaaagttctggattacaggtgctgagagtagtgatacagctcaaacatacgtaaacgtttgtcatttatctggggtttatgcatttgtagattgatctggatactattgatgtaagcaacctcaacagacagtttttgtttcaaaagaaacatgttggaagatcaaaggcacaggtaactatatttctcataccatttctataacttgatggagcttctatttgtgataccagattaatcctgcctgtcatataggagggaaaaaatgggtgaagctctcatttcagctgagagattgtgaaggataaagatatatcaagtaaaggactaaagattaagccctccttttttgttctaaaaaggaaataatcccgtgatggtgtaactttcatggcctctttatatttaagtttctgatgctttgcttaggatgcaccttgtgttcctacaccccctagaggttgactactgctatgtttgggggctagaggagcgttatgctgctgtcctagttgaaacaagacagttcccccgatctttgtttagtttttttagtgttccttggtgattcagagtcttaaaacatcttttccctttgcctgtctcccaacctgtttggcaaacccccacttgtttctctttttctttcatattttggcttcctcctccaggagtactttcctaaaccttttagactaagtcaggttggtttttctctcataacaacctttactttacttttcctatcattttcttttcttttttttttttttttttttttttagagatagggtctcactctgtcgccccaggctggagtggagtgatgcggtcatggcttactgcagcctagaactcctggcctcaagggatcctcctacactggcctcccaagtgctgggattacaggcatgagccaccatgcctggccttttcctgtcattctcatggcatttatcagagtctgtagttgaacttaatctggattgttatttgattaatgtctctcttgcttgacatgtacgttgtatagttcctggtacatgcaagatgctcagtaaatacttgttaagtgaatgaatgaatgacacttggttacttcatgttgtatttttgctgaagcttgccattcatgtagaagtgtgtttggtggtacgtgggtcagggggggctctccggttattttataagtataaaagtataattttataagtgtagcttaaccctaatgcaattttctcacatttttggacttctttggtgtttaatataaataaggtactatgtaagtagataacagcattgtggcttccagaagcagatttcagataggaacagaaatattgtagtaattcagtgttgtttatttttccaggttgccaaggaaagtgtactgcagttttacccgaaagctaatatcgttgcctaccatgacagcatcatgaagtatgctatagtgattacattgcaaagttgtataagggttttgtaagccaaatatataagctcaaagtcattcagcttttttaaaaaaaatgatttttctagaattattaaacagtggtggtttctgcttacagagtggcattctttttaccagttcataaatacatggtttgaatgatttagaatggtgagatagtttaatacttttaataaataagttacttggaaatttataaagaccttatatgcttgccttaagtaagaagatattttaaactatgaaatatccttatttatgatgattcagacttttctaaagtgtttgcctttttttgtttaaaagtttccctcccaaaataatctgtagtatgactctgacttctgtaatataacacttggaattgtggtagggcagtagtattgacagtacataaatatatttatctcagtaaagatagagtaaatatataattttggaggagttggagcaaaggaactgtgggccgaaattgtcctttatctatggtggtttagcttgcaagtaaatagtgttaaaaatagtccttgtttgaggtactggaattgaggtacttaacactttctcagggcatttgtatctccggattgtgttttttttgtgtgtgagatagggttttgcgcttattgcccaggctggagtacagtggcatgatcttggctcactgcaacctccgcctcctgggttcaagcgattctcctgtctcagcctcctgagtagttgggattacaggcgcacgccaccacactcagctaatttttgtattttagtaggcggggtttcatcatgttggccaggctggtctcaaactcccgacctcaggtgatccacccgccttggcctcccaaagtgcagggattacaggcgtgagccactgcacccggcctgtatctccggcttgttttttagttttttactctgtgaacctgcctgtagccctataacctccttaccctgtgttgctttcccagtgctgctaaaaacagagaccctaggggcctgaaccctgcctgatcctgatcatgtgaggtgaagtcagaggccaggcagatcctgggaatgtgttctttatgcgttcccaggcacttgctgcccaaagaaggcctagtgggactagtgaagtcatgccatctttctgccagtttgagatctttctcttgtgccctagctggccaaaaaggataggaatttgaaggaaataatttctttaaaatctgcttatgtttggaaagagtcaaaccttactatctatatgacatataatcctgatatcagttttgtttacagttactatgtttttttcagaactgtttattatactgcaaagatcatgtggaaggctagttattttggtgacctttttttattttgttttgtagccctgactataatgtggaatttttccgacagtttatactggttatgaatgctttagataacagaggtgaggttattttaatacttttaatttctcagtatttcctctctcccatatcaaatttgtttacaaatttaatatttattagactattgtgatttagaacttaaaagacttaagagaaatgatcgagtttaaagcatgcccattgattgcagttttatatagaaatgacttattccaggcgggaatttagctatcatattctctgcatttctaccaaaaggtataaatagaagtgaagtgaaaagctctcaaaaagtgtgactgtggctcagcacagtggctcacgcctgtaatcccagcactttgagagaccaaggcaggaggatcacttgaggtcaggagttcgagaccaacctagtcaacatggtgaaaccgtctctaccaaaaaacacaaaaattagccggtgtggtggcatgtgcctgtagtcccagcttctccggaggctgaggtgggagaatcgcttgaagccaggaggcagaggttgcagtgagcctagatcacaccactacactccagccttggtgacagagtgcgaccctgtctcaaaaaaagaaaaagtgtgactggagggtggggtgggggatgcttgagtgatattctttgtctgtaattacttccacatgtaaaagtatatctactaagtgagtttacaacaagttgggccagaaatatctaaataaaaaacacaaggaaaagtcaaaattacgtttattttttaaggcttggggggtctcactgttgcccagactagagtgcactggtgtgatcataactcactgaagccttcaaatgggctcaggtgatactcttacctcaacctctgcagtagctactctgcagacaggtaccaccatacccggctaatttttttatgtttatttttgtagggatgaagtcttgctttgttgcccaggctggcctcgaactcctggcttcaagcagtcctcccacctcagcctcccagaatgctgagattatgggcatgagccagtgctcctggcgtgaaattactctcttaacctgactcatcttttttccctagccttaaactactttaatagttccaagttgatattccacattctgccttcatttctatcatgtattatctgctagttatattagaatagtggtgagtttaggaacaccttgaaacagtgttttgtgtaaggtacagcaatagaagagaaatatggcacgttggatttttaagattatgtgtttctgtgggtacttctcctggagtaaatttgtgatataaattctatttgatattttgctaagtgaatgtctcttaaatgtctgtaattaacagttgtattattctggccatagctataagaaaattgtacaaaaaatgaagccagtaagatagttttgagtctgtgtcatcctaattaaagataactaattttttttttcccaaaaactcatactgtttgttttacttccagctgcccgaaaccatgttaatagaatgtgcctggcagctgatgttcctcttattgaaagtggaacagctgggtatcttggacaagtaactactatcaaaaaggtaaagaaaagttttatttttttaacttcccaaatatttatttgagaccttggagcaggaggaaataaactttgtatttatataaaatgaacaggtgaacatccaaaatgtaaggacttttatgcttatataaaacttaaaatgcggggccaggtgcagtggctcatacctgtaatcccagcacttcgggaggccgaggtgggcggatcacctgaggtcaggagtttgagaccagcctggcaagcatggtgaaaccccatctctactaaaaatacaaaaattagctggacatggtggccggcgcctgtaatcccagctacttgggaggctgagccaggcgaatcacttgaacctgagaggcagaggttgcagtaagctgagattgcaccactgccctccagcctgggctacagatcaagcctctgtctcaaaaaacaaacttaaaatgctataaacgtgctcaaaagactatgggcaaggaaatctttcagctctgccattttgtttcatttgacttttgtattaaaatccttagagtggtaagcatgatataccaggcatcaaaaatttctttgtgtcggctgcgtgcagtggctcatgcctgtaatcccagcactttgggaggctgaggtaggcagatgacttgaggtcaggagttcgagaccagcctctccaatgtagtgaaaccacgtctctacaaaaaatacaaaaattagctgggtgtggaggcgtgtacctgtaatcccagctagttgggagactgaagcatgagaattgcttgaacctcggaggtggaggttacagtgagccaagatggcaccacactccagcctgggcaacagagtgagactccatctcaaaaaaaaaaagccaggcgtgatggctcatgcctgtaatcccagcactttttgggaacccgaagcgagcggatcacctgaggtcaggattttgagaccagcctgtccaacatggtgaaaccctgtctctactaaaaatacaaaaatcagcgggcgtggtggtgtgcacctgtaatcccagctacttgggaggctgaggcaggagaatcccttgaaccggggaagcggaggttgcggtgagctgagatcacgccattgcactccagcctgggcaacgagcgaaactctgtctcaaaaaaaaaaaaaccaaaaaattctgttgtctaagagtctgggcttataatgtggaagggaactttgaaaactttttaggggtgtatttgtgaagtacttcaaacatttaaatacaactagagaataatagaacaaaatacctgtgtgctcatacctcagttttgttttggtttatttatttatttgtttatttttttgagacagaatttcgctcttgttgcccaggctgcagtgcagtggcgcgatctcagctcgccgcaacctccgtctccctggttcaagcgattctcctgcctcagtctcccgagtagctgggattacaggcgtgcgccaccacgcctggctaattttgtatttttagtagagacggggtttctctatgttggtcaggctggtcttcaactcctgacctcaggtgatccacctgcctcggcctcccaaagtgctgggattataggtgtgagccgccatgcctggcacatatctcagtttttaaaacctcaacacggcttcatttgctattcagatattttttctttcagttcttttaagaagttaaatattgtagttacatttgaagagtcgttttccatgttttgaaactatagaaagagaattataatgtacttaacatttgctggttgcgtctaattttttttggcagcttattcatgttagaaattgtgtctttgtttcttttaactgttaaatgttattcttggaaccttattgaataccattctacaaaagactgttgtgtatgtcagtgcgtattaagttgttgaataagtggaggccttcagtatctgttgacagatcaagacggaagttctctgtctgcattgcagtatgagtctcatgactgcttgccatgtggctaccctcaagaaagcatattggaaggctgagggcatcagaaatggtgtttcagagaaaactctaaatctgctgcaatttatattaaaacagtatttgagagttttgattcttgaacaattagcctggctaatttttgcatttttggtagagatgaggttttgccatgttagccaggctggtctcaaactcctgacctcaggtgatccgcctgccttggcctcccaaagtgctgggattacaggtatgagccaccacgcccggccagacattgctttttatatccttgttactgtgattctgacacaccactgtgtattaagactgaaggtggctgggcatggtggcttacgcctgtaatcccagcactttgggaggccaaggcgggcggatcacctgaggtaaggagttcgagaccagcctggccaacatggtgaaaccccatctctactaaaaatacaaaatttagctgggtgtggtggcacgcacctgtaatcccagctacttgggaggctgaggcaaaagaatcacttgaacccgggaggcagaggttgtggtgagcctagatcacgccattgcactccaacctgggcaacgagcgaaattccgtctcagacaaaaagaaaaaaagaagagactgaggttaggaatatctgagataatgaaagatgattcatttgatagttttgaaaagttgtctcaggtgtcatgtacttcttccaaggcataaattccttaaattgtaattttaaacttgaatgtgtatcaataaaatgggctgggcgcagtggctcacgcctgtaatcccagcacttttgggaagccaaggcgggcgaatcacatgaagtcaggagttcaagaccaagctggccaacatggaaaaaccccgtctctactaaaaatatgaaaattagctgggagtggtgggagatgcctgtaatcccagctctttgggagcctgaggcaggagaattgcttgaacctgggaggcggagattgcagccaagattatgccactgtactccagccagggtgacagagcaagactccgtctccccaccgccaaaaagaaacgtatatcaataaaatgaagagtatttggtttagtaacacctaagatttttctgtgtagggagatatatcttgaaattaatcttgtagtttacttaatttcaggagattataaggatatggctgtattccccagacccacttagttttgctcaaaaaaaaaaaaaaaacacatataagaaaatggctgcgaataatatttagataacatttacaactttgagaaataatttcttggaaagctgctgtttgtctttccagtagtttttctgtttagtgtgatcaaggtaaactcatatttgacactcaggtgtagtaatttttatttgggcttgtaagtcatgttcactgaaccaggagtcggcgtcctggcacagccttagctatgactggtagattcagttagcttttgtgttagtttatcataaagtaagcattttggagtcactaatattttaaaatttccttgacaacgtaaaacgtagttggaatatagatgaatgaagtgtttatattaccttataatgttgagaaactgccatcatggagtaaatttttctcatatcctgacttcatagggtgtgaccgagtgttatgagtgtcatcctaagccgacccagagaacctttcctggctgtacaattcgtaacacaccttcagaacctatacattgcatcgtttgggcaaagtacttgttcaagtaagagtgtatatttcttggcatgcttttcggtactgatgatggaaaatggagtcatttttatttaattaccttgaagagattgaactcaggatgtttaaatatggtgaagggatgctttagtagctttcttgcagtatttcttaggttaaatgtagctggccgggtgcggtggctcacacctgtaatcccggcactttgggaaactgaggtggtcggatcacctgagcgcaggagtttgagaccagcgtggccagcatggtgaaacacatctctactaaaaatacaaaaattagttggccgtgatggcgagtgcctgtaatcccagctactcgggaggctgaggcaagagaattgcttgaacccaggaggtggaggttggagtgagccgagatcgcgccactgcactccagcttggcaacagagtgagaatttgtctcaaaaaaaaaaaaaaaaaatgtggccatgactgttcaggaaacttagtcttatattggagacagccatgtaactaagcgataaaaatctttatatttggaaatgtgaacatttacttacaaataacccattggttataaaagaaatcacaatggaagttaaaaatactctgtactgataatgatgaaaatgctataccagaatgtattgaatgtggtggttggcaaaaagttacagatttacatacatgaagaaaggctgaacattaattactaaatctttactaagaatccaatttaagttagaaaatgaaccacagaatacactttaagaaatgagaatggtgtgggcatggtggctcatgcctctaatcccagcactgtgggagggtgagatgggaggatcccttgagcccaggagtttgagaccagcctgggaaacatggcaaaaccgtgtctctacaaaaaatagaaaaatgagccaggtgtacctgtactcccagctacttgggaggccgaggtaggaggatcagttgagcctgggaggttgaggctgcagtgaaccgagatagtgccactgcactccagcctgggtgatagtgagatcctgtcttaaaatgaagaaagaaagaaaaaaagaatgagaaggaaggatattaattgaagtaagagcacatttgattacaaaatagaagaggagtaagtgagaactaaacggggaatacagatagcagagattaaataggctataagaaaaaaaagggatgataataagaccatggtagtacataaaaaatttaaatgatctgggtaaatacatttttaaaaacttactaagtgcccagtgcggtggctcaggcctgcaatcccagcactttgggaggctgaggtgggtgggtcacttgaggccaggagtttgagaacagcctggccaacatggcgaaaccccgtctctactataaatacaaaaattaaccaggcgtggtggtgggcatctgtagtcccagctacttgggagactgagccatgagaatcacttgaacccagtgggtggagattgggccactgcactccagcctgggggacagcatgagatgatgtttcaaaaaaaaaaaaaaaatgaaaggaaaatagaatgcctgaatttagcagtataccttagagcaatgtaagtagtttaaattattctaaataatgcaccgaacctatgttatttttacagattcatttcacaaaacttgcaaggagtatattgtaatattagctaaactctccctgagaaatttttaaaagggaatactacttagcttgtgttattaggctagcaatgtctttgatagcaaaacctgtcaaggccattatggcataagaaacaattgctagtcagtctcacacctaaataatagatgcaaaaatcctatgtaaaatattagcatatcctgggaatgggcgcagtgtatcatgcctgtaatctcagcacttggaagctgaagcgggtggatcacctgaggtcaggagttcaagaccaacttggccaatatggcgaaatcctgtctctattaaaaatacaaaattagccggacatggtggtgggcgcctataatcccagctacttgggaggctgaggcaggagaattgcttgaacccgggaggtggaggctgcagtgagccgagatcgctctgctgcgctccagcctgggcaacagagcaagactccatctcaaaaaaaaaaaaaaaaaaattaccatatggatctagaatcatataaaataaaaagtgtgtcttgaccacgtgtctattcaggaatacaagcatggtttaaactagaaaatctgtaaatgtcattcactcattaggaaattaaagataaactatatagttttcatagatacagagaaagcatttggtaaaatttagcaaatggcctttcatgatgaaagtttctactaaaacagaataaaaacttactaggccgggcgaggtggctcacgcctgtaatcccagcactttgggaggctgaggcgagcggatcacgaggtcaggagatcgagaccatcctggctaacacggtgaaaccccatctctactacaaataaaaaaaattagccggatgtggtggtgggtgcctgtagtcccagctgctcaggaggctgaggcaggagaatggcgtgaacccgggaggcggaggttgcagtgagctgagattgcaccactgcactccagcctgggcgacagagcgatactccgtctcaaaaaaataaaaaataaataaatagataaaattaaaaataaaaaaacttcttactaaaatgagaatgttctcaacccgataaagggtattttgtagaaaccttcagcaaacattgtctttaatttttgcactcagaaaagtatacataacagtgtcaacttgataaatgttcacaaaaactacacttggaagctttatttatttggcaaacattttttttctttgggaggctgaggtgggtgaatcacttgaggccaggagtttgagaactgcctgggcaacatggcgaaaccctgtctctactaaaaatacaaaaattagtggggtgtggtggcacacgcctgtagtcccacctactcgggaggctgagccatgagagccgcttgaacctgggaggcggaggttgaagtgaatggagatcatgctactgcactccaacctgggggacagagcgagactgtgtctcagaaaaagacaaaaaaaaaaaaaagataatgtggccaggtgcagtgacacacacctgtaatcccggctctttaggaggccaaggcaggaggattgcttgagcccagcagtttgagagcagtgtgggcaacatagtgaaaccccatcactacaaaaaatttaaaaattagcaaggcatggtggcacatgcctgtggtcccagctacttgggaggctgaggtgagaggatcacttgagcctaggaggtcgaggctgcagtgagctgtgatcacaccactgcacactagccttggggacagtaagaccctgtcacacacacaaaaaagataatctggcaaaattaatatgagcagcatttttcactcgaagggaaacctaaataagcaataagcaagttatgttttaatcataagacttacttggaaaattaagtataagaccatagtaagctacagatgcttctcagatacttcccgataaactcatcataaataaaaaataccattaagtaaaaaatgatgctttttttgttgttgtttttttgagatggagtttcgctcttgttgcccaggctggagtgcagtgcaactgcaatctctgcctcctgggttcaagcgattctcctgctcagcctctcgagtggctgggattacaggcgtctgccaccacgcccagctaatatttgtattttagtagatacagggtttcaccttgttggccaggctggtctcaaactcctgacttcggttgatccacccgcctcggcctcccaaagtgttgggattacacatgtgagccaccacgcccagccaaaaatgcattttaatataacctcaataaacctgttgtaaaggtgaaaaatcattggtggaccattttaaattagcggctgtctactattttgcactcactagttggcaaagcgttaattttaggaagtgttaacatgccattgttgggagtgactatcagagctttgaaattatagttgggtggggggttgtacaaaggatttctgtaagataactttcattaatcatatacttgaggaaatactggaaacttttatatccatgagttattaaacagtttttaggataactttattaataaaagagaatctcagcttaatactttcaaattgtttgttaacactctgttcagcagtaaagagccattctaccatgaaaaaaagttaatcttgttcattgctgaatttctatcccctagatggggactctgcacctgaggtatataataatgtttgttgaacaggtagctgcaggtgtaaacacaaacattattctggtgttagaatgttatccaggttgtaagtgaaaaccactcacctgtttcttgagcagaggttttaacattgaaatgtgcagagcctcgctgataggaatggatgtaggtctgctaaaatttaaccttgcttacattgctgttgaaattgggatgcaagctgtccaagcacattgtgttaaacttttaagtttatagtcatttatccgttattcacttttttttttttttttttgagacggagtcttgctctgttgcccaggccggagtgcagttgtgcagtctcggctcactgcaacctccatctcctgggttcaagcgattctcctgcctcagcttcccgagtagctgggattacaggcgtgcgctaccacgcctggctaatttttatatttttggtagagacgaggtttcaccatgttggtcaggctggtctcgaactcctgactttgtgatctgcctgcctcagcctcccaaaatgttgggattaaaggtgtgagccactgcgcccagccagttgttcagtctttatctctgctaaatatttggaatattctaaattacatgtttgtttagaatgctttgttatacagaagtatttactattcttaaattatagccagttgtttggggaagaagatgctgatcaagaagtatctcctgacagagctgaccctgaagctgcctgtgagtaaattatttggcatatgttttatcagatactattatctttattttgttgatttaattttggtagcttaagggaaaaaaattgctatatgtgctaggtaatgtgtgtttaacatgtgttttttttttgttttttttttttttttttttttttgtctcagaggtggagtttctctcttattgcccaggctggagtacaatggtataatctcggctcactgcaacctccgccttctgggttcaaatgattctcctgcctcaggctcctgagtagctgggattacaggcacctgccaccgcgcccagctaatttttgtatatttagtagagacagggtttcaccatgttagccaggctggtctcgaactcttgacctgaggtgatccacccgccttggcctcccaaagtgctgggacaggcgtaagcaaccgtgcctatccaaaacaatgttttacaaaaaaaatatgattccgttttactgatgaggaaatcaaggttaagagaaatttcacaagtctagtaaatagagctgcgagttgttcctagatctcatgactggtctgtgctttgaactgttatatgtgtagctttcagaaactaagttacaacaggccaggcaaggtggctcacgcccgtagtcccagcattttgggaggctgaagcagctggattgcatgaggtcaggagtttgagaccagcctggccaacatggcaaaaccctgtctctacaaaaaatataaaaattagccaggcatggtggtgcatacctgtagtcccaactacttgtgaggttgagacgggaagatggcttgagcccaagaggtagaagctacagtgagccgagatcttaacactgcactccagcctgggcaacagagtgagactttgtctccaaaaacaagaaagaaagaaactgggatacaaaaagatgctgatgaatgtgttattttcttattccttgaactcagaatgtgttgcatttggggatttccatgagtgactttctttttattcccaaaggtgagtgaaaagagttcagttctacatttattacggttgaaaataaaataatgatcgttttataggggaaccaacggaagccgaagccagagctagagcatctaatgaagatggtgacattaaacgtatttctactaaggaatgggctaaatcaactggatatgatccagttaaactttttaccaaggttagatttactttttttataatcatggatagatgtattgttgtgcatagatgtattgttctagttctgcttgttttaaaatagtccataaaattgaattaagcttctatgtatatgccttgtgatgtcctaataaaatgattgatgcagtcaggatatgcaagttttaaaatgttaccatctacactaaatctatcagtataacatctaaataggaggtaaaatgagaggtggcttgtataccttcttggttgtctttccttctctcactttttacagaacttcttcgttttcctgctgcttctcatcttcactttttttttttttttttttttgagatggagtctcactcttgtcgcccaggctggagtgcagtggcacgatctcggctcactgcagccccgcctcctgggttcaagtgattctcctgcctcagccttccgagtagctgggattacaggtgtgtaccatcaggcctggctaattttgtatttttagtagaagcggggtctcaccatgttggccaggtaggtcatgaactcctgactgcaagtgatctgcccaccttggcttcccaaagtgatgggattataggcgtgagccactgctcctggcttcatgttcacttttatttcttgctcatatctgctattagcagtttgactgacatgtgtcctaaattgcccttgaaccccataagcccctttttcttggtgaaatccctcttcatcagtagtatatactatttgcctgttaaatatttctagagaaatctgtgaaattgtttttattgggtctacctaattattgttcatctagacccgtaggtccgtgttttaaaagtttttttgttctgtcttgactccctagcaagttgtacgtgtgtggggtttttttgactctttttttcctttttgtggagaatggggtctcaccatgttgcccaggcagatctcaaactcctggtttcaagtctcaaactcctgggttcaagcgatcctccagcctctgcctccctaagtgctgggattacaggcatgaaccactgagcctagcccctagcaagtttatcacagagcttaaaactttctcagctcttatcaaactgcctcagtattcttgcaactctcactaagcagatgaccttaaggatataataacaggtttgaaaccattggacataatttacctgttgagagactgttccacataaccgaaaactctttttctttctgctggagagaatccactttcggtaaaggctaacttttgcatgtggtgttttgctttccttttgtaccattcttcagacaggattttcgtctctgtcctgtgtctcggatcttttttttcttggtttcttttgtctgctttccaacacgcacaggttctgctgtcttaatcaaatgacatactgctctccccagcttgtatttcgtcttatttcctcagtggtaacagatgtcacatgttgacttttttttttctttctttttttttttttttgagagagaatcctgctctgtcgcccaggctagagtgcagtggcatgatctcagcttgctgcaacctctgcctcctggttcaggctattctcctgcctcagcctcctgagtagctgggattacaggtccgccactatgcctggctaatttttgtatttttagtagatagggggtttcaccatattggccaggctggtctcgaactcctacctcaggtgatctgcctgcctcggcctcccaaagtgctgggattacaggcatgagccgtcgtgcccagcccacaggttgactttcttatccctattgcatttatttcctcactacagcccttttctaaaacatggttgtattagggttctctagagggacagagctaataggatagatatatacaaaggggagttgatagagtattaattcacacgatcacaaggcccaacaataggcccatctgcaagctgaggagcaaggagagccagtctgagtctcaaaactggagaatttggagtctgatgtttgagggcaggaagcatccaacatgggagaaagatgtaggctgggaggctaggccagtctagtcttttcatgtttttctggctgctgtatattctggcctcaatggcagctgattagatggtgcccacccagattaagagagggtttgcttttcccagtccactgactcaaatattaatgtcttttggcaacaccctcacacacacacccaagaccagtactttgcatctttcaatccaatcaagttgacactcagtattaagcatcataatggtttttattttgattatacttaagatgccgtaaacttcgatatggtcaacagcagtatcttccaaaccagtatccttatttccattccaatctgagcaagacttgaaagccagaaaaatctgaagtgcatctccaatctgttatttagcagataattttaaacatctgctgtgtgccagacacctctttaagtacaggggatttagttgtgaacaagacagaagacagagtccttgctctttagagggagttcacagtctagatgagaagtcaaactttgaacaataaatttcagcttcagagtcttaatgacattaagttcagatgctttgcagcccttgaataataagtttcatctaaaggactcatctcctggcctgcatacccatttcagatgttgttagggagaggcttcagaagaggctttctagagcaggtgacatttaagcccaaggcttgaaagaataagagtcagaatagggtacagtatgtacaaggaaactctgaatagggtacagtatgtacaaggaaactctcagttggaaaactgacataaatcccattaagggggagagtggaaaaagatgactggagagagaagttgaggtcagatcaggcagactttctaggccttcttaaggatgttatagcaagacagtgggaatccattgaaaggtggtcttacaggatcactataaggggatagaggggatgcacatactaccctaggatctgatattcatattataaccaatctgggacagtgcccctggagttgtgcagtgccagaataatctggagtacagccatctgtactcccactggaacatggaggagtagactaaacaggactttgcatgtatatggtgaagatcagtggaataaaaaatggtacctggctgggcactgtggcttacacttgtaatcctagcactttggaaggctgaggcgggaggatcacttgaggccaggagcacaagaccagcctgggcaatatagcaagaccccatctctaaaaacgaaaaaaaaatagccagccatggtggcctgagcctgcggtccccagctactcaggaggctgggacaggaatatcacttgagcccaagaggttgagacttcagtgagctatggtcacaccactgcacttcagcctgggcaggtcaaagaacagaggtgctgttctccgatataagtgagctgggaggcagatgtgtgtagaggggttgggggagggtaggagaaggtgataataatcaattttgaactcatttgagattcttttggaacattagagaagtggttttgtagataagtagagaggtttcaactagggatatggttgggattcctaggtttatagatgtggttaactactggaaatggacatgatacaccacagaggacagaatgaaaagatggttcagtacagaaatctgaggggctcctgatatttagtaatagttgaatagaagagatggagcttaggcttagaaaactgttggttcaagccttcaagatcctctacaaaatgtttccagccacatttgttacccaagtcatagtggattcatctccttgcctttgtacccatttcacatgttgctgtcataaggagactctttccttatttcttagataaaatataaatctttttttttttttttttttttttgagactgagtctcactctgttgccaggctggagtgcagtggtgcgatctcagctgactgcactctccgcctcccaggttcaagcgattctcctgcctcagcctcccgagtagctgggattacaggcacgcgccacgacgcccagctgatttttgtatttttagtagagatggggtttcaccatgttggccaggatggtctcgatctcttgacttcgtgatccacctaccttggtctcccaaagtgctggattacaggtgtgagccaccacgcctggccagaaatccttactcaaggctttgtgatattcacactaaattgtattctgattatttgtatgtttggcttattctctataaagattaaggatgctcagttagtattgatggattaagtatattttgatagaaatggctgtgatttttaaatatagccaaatttctgttcttacctggtaccagcaataaatgtgttgaataaattaatcaacaatagaaaatgcagataaggaaaaagaaaaaaatattaaaatcacttgaagttctaacacatcttttcatatgatagtttctcaatctacttgtaatgtttttgtttttgtaataattgtgtgggggtttttacattttatttttgttcatgtttctgtgggttatttttggaggggagggcacattttaaagatatcgcagttcagaagttctgttgtgaagcactttagtttaaaaatctgtatactttgtgtgcatgtccccatgagcttggaggcattgctgactggcatccctaggctcagtgattgtctgtagttgtacatttatttacaactacataatgtacatttatttgtatgattgtgcttcagactgatctttggagctaaatttagggaagcttttggagaggtgacttaggaaggcaggggcagtcggcagttcagggctcctttactctgcattcctcagagcacttctgcatttcgctgttttcaatgtagagattctgttagaacttccttttacaaatgtttttccttttgaaaattgttatgctgctggtatatgacatgtatctttaaatcagatttcatagtgtaatatagatcagcaatgacgttttcttgtatcttatcaattagggattatggggttcatgggatctgtctttcttttgtaagctttttaaagatgacatcaggtatctgttgacaatggacaaactatggcggaaaaggaaacctccagttccgttggactgggctgaagtacaaagtcaaggtaaagaatacattttagtcttggaacacctaagctggaaatatcctcgcgtaaagtctttgtatagccctgttgttgcttgaaaatgatatgtcttcatatattcaaacagtgcaaaaaaatatgaagaacaaaagtcactgaagtcccacacttcagaaatagccactaataacattttcaggagtgttctggtggtccgccctatgtacacagatgcaggcattcgttatacactgcgtaaatggaatcatactattgataaactctcacttgcttttgtcagtcagtatagttaactagtctcttattaacatgtagtgtttttgtattttccctgaaataaagttttgaaattgctatatatttatgtatatcttttttttttttttttttttttttgagaccgtgtctcgctctgttgccaaggctggagcgcagtggcacgatctcagctcaccgcaacctgggttcaagcgattctcccgcctcagcctcccgagtagctgggataacaggtgtgagccactgcgcctagcctatttatgtacacctttgtacccttgtgattatctctttaagatttaatctagaaacacatttttaatgtaaaatttttttaatgtttagaaatgaaaagttttttgaggcatagtcttgctatgttgcccagattagagtgcagtggctgttcacaggctgtcatagcacaaggcatccctggactcctgggctcaagccatcctcctccctcagtctcctgagtagctgggactgtatgcaactgtgcccagcatattttaaaattttaaatgtaggaaaactattgtagtggctgctttctcatcccactcccctttaacactccttgtctctcctttatctgaactgtattaggattaatttatgcacagcagtatagcacccattgaaacttaaaagatcccgggagacttgggatatcattttggagcagttctcaacaatcagggatagttatcaaacagatttaattatgactctagtagtgtccgcttactgagttctcattctcactaggtgctgggcctaatgcttatttatcatcttatctacattatatcttcaaatctcccagtaatcctatgaggtactgaggtggtcttgtacctttcctatctcaggtttaacagtttttttttttttttttttttttttttttgagacagagtcttgctctgtcgcccaggctggagtgcagtggcgcgatcttggctcactgcaagctccgcctcccgggttcgcgccattctcctgcctcagcctcctgagtagctgggactacaggcgcccgccaccatgcctgcatattttttgtatttttagtagagacggggtttcaccatgttagccaggatggtctcgatctcctgacctcatgatccgtctgcctcggcctcccaaagtgctgggattacaggcgtgagccaccgtgcctggccccatgataattattttaatggaatttatttcatatttgatttcttaatggtcggggattgaacttgttaaacagagcacagtagaggaatgatgttaattagtgaaatttctaatatatatatttttttctttaggagaagaaacgaatgcatcagatcaacagaatgaaccccagttaggcctgaaagaccagcaggttctagatgtaaagagctatgcacgtcttttttcaaagagcatcgagactttgagagttcatttagcagaaaagggggatggagctgagctcatatgggataaggttcgttttgacaatgtgtggcaagtacttacatgtcaaaagtgtgttttagttcttgagatgtaatagaagctagtcattttttgaatatttactagattttgaggaaatatattgatttggcttggatattttcagctctaattgctgtatggagctgaattttctgtacatgaattcaagcaatatcataaaacttcatttgggattctagtgatgtgttcagggtttataattatgttgactagaaaaataacgtgaatatattaaagtgaaatgtttcttgtgtagagtagatgtattcatagaagtcataaaatcatttggagaaaacatctcattggcctgatttgcccttgaaaatagtaagattgtctttgaattgaaatagttattactatttcagaggtctgaaagacagagctcttgatacaaaaatgagatgtaattattcttagaagttaaaatcatatttaatagtactctgcagttatgtcatcttttgagatttgatattatgaactaattttacttaattttaattgtaatcagtattttctatggctaaaagtgttttatctcatgaagcttgtatgttcctgtggtgttgaagattagtcatgggtcttaaggcataaaggccaattttagaaacctaagaaaaatttgtgtgtacatattttgaaactttggttgaatcagacatctaaatacactaaaatgaagctagtatatttagattcttgggattcttataaacattagtctcttgggttttgtgatatttaaagggtaacttttcatattttcattgttattgttatgctagtgatttgggaagtttgattagtgcacagaggctaaataaagagcccttggaatgggaattgttatcctcttgagtaaagtccacatgtaatgggtgtgataagacagctgcttagggaagacactgtgttgagtattcagtattcttagtcctcaccacaccttatgagatggggatataatttcccctatttaatagattaagagattttgactcaaggaatttgacttgcctgaggattcacagccagccaataaatacataaagaactatgctctcagtattttttcttctgttctgtgatgcctctgaattttagaccagggtgatatcttctcagttcaaagcaggaagccttgctgaaatctagagactaggatatagtctcaggaaaaatacaaatcgtaacaggaaaaacttggattgtattgccttatttgaagaaacagcatatgtgagagagtggtgcatatgaagagagtttggcaaaggggagtgaaaaagagtcatccaggtttttctgaagtgttaatgaaacagcttttttttttttttttttttaattgagacagggtctcactctgtcaccaaggctggagtgcagtggcatgatcttggcttactgcagcctctgcgtcccgggttcaagtgatcccgccacctcaggctcccgagtacctgggacgactttaggtgtgcgccaccatgcctggctaattttttgtgtttttggtggagatggggttttgccacgttgcccgggctggtcacaaactcctgagctcaggcaatctgcttgcctcaacctactaaattgcttgagactacaggcatgagccaccatgcccagcctaaaacagttttcttaaattgctcgtcttttggcctggattctgtgtttgtccagcaaccttctctttactgatgaatggaaccaggaaagggttgccattgtcagtgagtggaattgagattccggtgtatacaactgagtctccggtgcctttgtttaggctggagtgagttcctagaagctggtgattcttggtgttcttgtcagactcattactggaccagaggagctgatgatgagaccccaccccctacttaacccacctccatgctactgtgaggtcctagctgactggtctttccctcagcaacctcttgttctagtcgaaagtctatagtattataaacacgtgaaagtattgttctgaaagtaatgcttcaaaatagtcaatttgtggagaaacttgttaaattgtttaaattattggcaggatgacccatctgcaatggattttgtcacctctgctgcaaacctcaggatgcatattttcagtatgaatatgaagagtagatttgatatcaaatgtaagttatttgtactaaagttgtatcactaaaaccttgaagttgttttttaaacagtgaaacatactcatccttttttttttttcccagcaatggcagggaacattattcctgctattgctactactaatgcagtaattgctgggttgatagtattggaaggattgaagattttatcaggaaaaatagaccagtgcagaacagtgagtatttctgtttgcatttttatgcaaccccccttaaaaaaatcattaattaaaagtacattaaacagataatttttaaaatgaaaacaataaaattggtttaaagcaatggaaaagtaatttttctggttaccaagtgagtgtgtgtttaagcttcctggaaattgcaacaaaaaggaaaaattaagaagttgcttttgcttttaacatttccaattttactgaattcttcgaagaattcattgtgcggtccttatactaagaagatgtttcaactgtttttcaattctgagagtgctatatgggttttaaaatttgcttggtcattttatagtcccctgttcagtcattctcctattgagtcattcttttcaattttattgtatagtttttgataatgttaatgtctgagatctttatgggtgagtctgctgtcatttctgctatttctcgtagtgatttgcttgtatggtttatgattttttaaaaactgaatgtgtattagaattgtgtctggtaattctttagggacccattgtagatgtatttcttcaaagagcatttgtggttattatatttgggtgcttggggcactgccaatacaggaccacttttaaattaggattttcaatacctatgtattcagaccacaaacctgcacgtgccctatgttattgtcatgaattatatgggaagatactcctccccctccactaagcaccaagtttaagatcatttttatggagaaagtatttttctcctctcttttcaggtccttgctttgtgtaagggtctcctgttttaagagttcctaccttagtggtgggtggggtaggtgtatctcttaaggctaacactacttggatgttctctttggattccttccttcgatgttgtgtctgcagacacttcgctttcttaccagctcaagaaggcttcctaggaaatactagccaatactttgactgttgtttaggttctcctttttatcattgaaataaaaagacctgtttaccttcagaaatttcaaaaaatatctagtttgcaatggtactgttattttgcagtgtcattgatgcacacttacttttttttatcttttgagacggagtctagctctgttgcccaggctggagtgcagtggcacaatcttggctcactgcaacctccacctcccaggatcaagcgattctcctgtctcagcctcctcagtagctaggattacaggtgcatgccaccatgccggctaatttttgtatttttagtagagacgggtttcactatgttggttaggctggtctcgaactcctgacctcatgatccgcccacctcggcctcccaaagtgctgggattacaggcatacaggcatgagccactgcgcccggccttttttttttaaactgatggggtcttgctatgttgtccgggttggtcctgaactcctgggctcaagcagtcctcccaccttggccccccaaagtgctgggattacaggtgtgagccactgcacttggcccgatgcgctctttttttccttttctttttcttttttttttttttttttgaggtggaatcttgctctcacccaggctggagtacagtggagtacagtgatgtgatctcggctcactgcaacctccacctgctgggttctagcgattctcctgcctcagcctctcaagtagctgggattactggcacatgccaccacacctggctaatttttgtattattagtagagacggtgtttcacctgttgcccagattggtctcaaactcctggcctgaagtgatccgcccttctcagcctcccagagtactgggatttcaggcgtgagctattgcgcccagcctcgatgcactcttaaaatattttattttcatgaaatttcagtttgaaggaacagaatcaaattgcccagtctgccatcttgatttagttttctatttaaacttttattgtatatgttatatttttaatttctaagaactttattttttggtatcttttttttgagatggagtcttgctctgtcacccaggctagagtgcagtggcgcgatctcagctcactgcaacctccacctcccaagtagaagtgattctcctgcctcagcctccccagtagctgggattacaggcgggtgccaccacgcctggctaatttttgtagttttaggagagacagggttttaccatgttagccaggctggtcatgaactcctgacctcaggtgatctgcccaccttggcctcccaaagtgctagaattacaggagtgagccaccgttcctggccgatacccagtttttaaattatttaaaaaaaattttttatagcagcctgaagctgtagtatccctttgagctcaccaacagtactaattactgaacttattaaaatgtctgttatttcccatcacatccttccggtttctttgcctgcttagctccatgccactcttggactattaatagtaatatatctggccgggcacgatggctcacacgtgtaatcccagctctttgggaggccgaggcaggcagatcacctgagattggaagttcgagactagcctgactaacgtggagaaacctggtctctactaaaaaaaaaaaaaatatatatatatatatatatatatatatatatataaaattagctgggcatggtggtgcatgtttgtaatcccagctactcaggaggctgaggcaggagaatcacttgaacctgggaggcggaagttgcattaagccgagatcgcgccattgcactccagcctggcaacaagagcgaaactctgcctcaagaaaaaatatagtaatatatctggatttcatttttttacatttgcaaatgaattccagcctggattaatgttagcccaggtattaatagtggtagcaattgcttttattattgtcagtttcccttagcacacttaccttcccggtgaagcccaaaatcaaacaaatctttctccctctgtagcctgcttggcctgggcagtttgcttctagcccttccacctaccagtattcattgtacggagaagctattttacagaggacggctttagtgtctcttgagggatttagttctgtattctcaggggaatccgtagagtactcctttagaattcattcctcttagcagactcaacactacattgtagtcacaagataaaggtttgtgtctcagcttcttgtcttctgacatttgttgtttctgttggatcttgctagtgttttctaaactttagtagaagcaggagcttggagcttttcttaatttcagtgtaatttgtatatttgccttggttcttaattatttttttgtttagtattagagaaatggtaaataggtacatatactgccagaaatacatttttttccctcattatataaatgttattctaatcagaaaatttgggaaggcagtgatgttgattctagacaactgtgaaaggcactatcgttaactggagaaattaatgtgttggtcttgtcaggagattgcttgcttgataagaatagcctcagggagggacaccagctgctgatacaatgatggcaccacagattaacatgcctgtgcccttactcttgccaaatcaggttgcagaagaacgcggagtcttatataatacaaggagatgtcttttcagcaagcctagctagcctagcctttagctgattagaaaagaaggttgaggccgggcgcggtggctcacgcctgtaatcccagcactttgggaggccgaggcgggcggatcacgaggtcaggagatcgagaccatcctggctaacacggtgaaaccccgtctctactaaaaaaaaaatacaaaaaattagccgggcgaggtggcgggcgcctgtagtcccagctactcgggaggctgaggcaggagaatggcgtgaaccccagggggcggagcctgcagtgagccgagattgcgccactgcactccagcctgggcgacagcaagactccgtctcaaaaaaaaaaaaaaaaaaaaaaaaaaaaaaaaaagaaggttgaaaaaccaggttcctaaaaaggtcatgattttcctgatccattttgccatctggacgggaatttttaagtcattttttattggatatctggtaaacgagattttagattgtatggcgtataaaattacagcacgtttccgatttctgcctgttatttctcctccaaagatttttttgaataaacaaccaaacccaagaaagaagcttcttgtgccttgtgcactggatcctcccaaccccaattgttatgtatgtgccagcaagccagaggtgactgtgcggctgaatgtccataaagtgactgttctcaccttacaagacaaggtcagtgcaaggcctgggtctcttttccttttgcttttacagtattactgtgatgacaaacaaacactagctgctgattctgaaaaggtccaactgcagagatgtgtggctgtgatttcctgggttattttgccttctggattcctgcaggcttttctgtctgtggttccagaataagtgcctcacattcccagaatggagtaggagtatttgactggaatctgcagcacagtggtggcacagtatcacagcaagcagaggacttctttgctctttgcttcccaggcagtgggtaaattctgtattttttgacaaataacaggtatccttgaatggtcctcactgtggcagtgagcagataagtatttgcatgcagtgcaaagtttgcatttccagtagagcaaagccccagttaccagctttgtattaaagggtataagtaacttgcagagttttggtttctctgcgtgttggacagtgcccactcccagcaaattagggggcttttgttatttctgaggtctgagttgaggctaagtggtggtacacacttatctaatatgacctgattctgatatggtaagttagtccctgaggacatagggcatttgcacacctggattcacctctggagctgaagcgagggaagaaatgggggtttaggacatggtctggtccttaagttcctgttaaattggctagatttgtgtattaggggagattttctttttttatgacccaaaagtgtcactttccactttgggatcacttcctattgttctctggttgtgaccatcataatgctacatatttacatgcctcttgagagaggaggaagtggcccttctcaaatagcagtgctgcctgatagggaatggcctttcttccagaaactggttaggcaggacggattgatttgagcttatgttttggtcaaggaagtggcaggtacagcagcgggtggttgccccagtttcttttctaggaaataattatctttggtatctcctgattcttgagcttcaaggttattcctctatttgtaggattcttagacctatagagagttcctccttttttccttctttcttttttaggagctggtaggatttaacagaatattatcacttctctaaatgcatggaacggggagacttatctgagagtcaggttaatgagaactgattccatctatgaaacccctgccattacagggttggcacagagactgaaatgaaatatgtcaagtgtgtagctcactacctaacctgcagggaaagacaaagtagcaagagccagccagggagttcctagtcccctgttgagatgaagttggatctgatctgcatcagtggtcagatgtggggatggaactcaggtgaatccccacggctttcctgcttgctctaagggatcttgaagagtgacttcgccggtttccaataaatagaaggggaaagtaagagcctttatagaagtctaggatttcttatgatctttaattacctacgttaatattttgaatccttttttttttttttgtagatagtgaaagaaaaatttgctatggtagcaccagatgtccaaattgaagatgggaaaggaacaatcctaatatcttccgaagagggagagacggaaggtatcatacattgtatttattcattcctctcattgaggagactgcttgaagagtgcacattagttgattcatttactgtatgtgatactcagtattgcagagagtggcagtgtttggtcatgaaggtgctctttcaaggtgacattgctgggggtcatcacacttccatgtttgggaactccatgtcagacattttcagggactgcagtgctcttgtccacttccaaggaacctccttgccgatatcatggatcctgggagctaaccttgtgatgagaagactattctgtctgtcagatcacagtgggtagggttctaaggcatttggagatttttctccaagagtggggaagccttggtagcctgttcctactatatagcagaaagattattgaaattcagtgcccggttttggctttctgatctttcctttcaaaagttcaagcagttcatcccttttgctaacacatttgctatacaaggtacaatacatttgattctgttgaagctttcatagtaaggattgcatcgtagttattcctccttcagactgtactcgttgatcctatacctccttggtcacttttgcagctcatttcttgagttgctgttctcgttttttccatgtcccagtttttgccagtgtactgttattttcgaaggtttctaggccctgtgtttccctgtatattgacttaattcatacctatttgtccattggtcatttattcatactttgtgaggtcctgatggcgattcagatgttaagccttctttaaattcaggtttagtgtcaaggttcttcttggttgtagttgcttgttgagaaattttttgggctattaggtcatgtgtaattggaggccatgttttggctgtgtggtgctctattttaggagtctacttgagtattcaagcctcattctagccagctgacttttaaaaaaatgtttgtttgtgattatatgctgtcccttagttgtagccagctctttcaaatgctagcttaaaaatggaaactggtcaggaatttcagtggcttcagcgtgacccttctgtacggaatacatgtggtatggagggtgagacagcacttaccagaatatgtgtggagtcctgtatgacaggcatagttttgggtattcataagtcaaggatgaataagacaacagaccttggcttgaagtgccttgcagcctggaagaagggagattgtcaacagctggattgagcatcgtccaaggaaaactagaaagagtgtgtacacagtatgaatctaaggaaagtatattcagctttgtgaaacggagggggagtaataggagagggagtactcttgggtcagtttttgaagtagtagtgaggactccctggacaaagaagagagcatttagacagaatgaacatctgtctacaaaggtgtgaacttgtgaaacaacctaaactgccttgggagtggcccattatttggtttcgctggaagttggggtgctgaggggttggcagcagtggtgaggttgaagtctttcttgtcacatgtgcagtgtgtgtcttcctcctctcccttgacccctaccctccagaggaaggggcagtatttcactgccacctgccaccagggtttaaacaggggagtagcagggagctattagggaggaggggattgagggatttttactaaggcagaggcaggtgatagatttgagatttgcaaagtcagaacttggagcccagttgaggaatagcattacaatgttagcagcgttgttaggcgagcacaagacttcacaggtgatgctagttcaccaaaatgtgaacccacattaactggttttccttttgaatgtgatggttccaagaggtttgcagtcagtggagatgtgtgaaagggcttggaggtggaaatctgggtaagaatgccaagggcattcctggtagattaaaatggtaaagcaagcaacagatctggaaaagaactaggagaaactgttagtattttctgggtgtcaacgtagggaaaggcgttctaagcgttttccttataaataatgaaaaaatgttaaaaagccaaaaaaaaagtggggggagactgaaaattgagattatatagaaaattgggcttggtgcactggctcacacctctaatcctagcactttgaggggccgaggcgggcagatcacttgaggccaggagtttgagaccagcctggccaacatggcaaaacctcatctcttgtaaaaatacaaaaattaggccgggcgttgtagctgtaatgccagcactttgggaggccgaggtgggtggatcacctgaggtcaggagttggagaccagcttggccaatatggcaaaaccctgtctctactaaaaatacaaaaattagccaggcatggtggagggggtgcatttaatcccagctattcgggaggctaaggcaggagaatcgcctgaacctgggaggtggaggttgcagtgagccaagatggtgccactgcactccagcctggacaacagagtgagactctgtctcaaaaaaaaaaaaaagaaagaaaattagttaggcatggtggtgcacacctgtagtcccagctattctggaggctgaggtaggaagactgctcaagtctgggatgcactctggcctgtgtgacacggtgagaccctgtctttaaaaaaaattgatttgaatggggaaaagttttcagaatttctcagtttggtccccctgaagtagtttcggtagttaagtgttttaagactgaattcccagcgttttaatgttttagggtactagggcctccataacaaataccacaacccaggtggcttaaacaacagaaatttatattctcacagttctggaggctggaacaccaagatgaaggtgctggcaggtttgttttattttaaaacctctctcctttgcttgcagatagctgcctttctgttgtgtcacatagcctttcctctaggggtgcacatccctgatgtctctgtccagattttgggattgattgattgattgattgattgactggagacagagtcctaaaaattttttttgctgctctgttgcctagcaggctggagtgcagtggtacagtcacacgcctcactgtgtaactcctgggcttcaggaatcaatccttccctggcctcccaaagtgctgagattatagatgtgagctactgtgcctgccttcctcctcctataaggacatcagtcagatcagattagagcccaccctacttgccccatttaaatttaatcattcctttaaaaagtcttatctccaaatacaatcagattctgagatactggggattagggtttcaacctttggattttggtgaacgggacacaaatcagcccataacagaggtttagctttttaaaaaatcaacctgactgctctatgaagatgtaactgaagtatctaaattattcacgtttcctagctaataatcacaagaagttgtcagaatttggaattagaaatggcagccggcttcaagcagatgacttcctccaggactatactttattgatcaacatccttcataggtaagagctattagtattttaattgtaagaaattatttgaatatataaactttagacaaaatgaaggaaaagtgttttcttatccttaaaccctgctgttcatttgaaactgtatagtatatttggttgagttggtcactgagttccgtgatgtttgacctacagaaaaatttgaggattcagaaattggcggggtgtggcggatcacctgaggtcaggagttcgagaccaacctggccaacacggtgaaaccccgtctctgctaaaaatgcaaaaattagccgggcatagtggcaggcgcctgtagtcccagctacttgggaggctaaggtaggagaatcccttgaacccgagaggtggaggttgcagtcagccgggatcgcgccattgcactccaacctgggagacagagtgagactccaacttaaaaaaaaaaaaaagaaaaccagaaataaaagaaataagcaaaaaatgttttaagagtaactgtcatcagtggtggcttatcagaaagacctagagtccaggtgtttgaacagtttaaacagaggcaaattcattgtagtaattaaactggaataaaattattaattatttttcaaggttctctagaaaaaaatatttcttccataaaacaaatcatttcgtttgtgattttgtggcaataacaaaagaatattgggaattgtctgtactggctgggcatggtggctcacacctgtaatcccagcattttgggaggtcgaggcgggtggatcacctgagatcaggagtttgagaccagcctggccaaaggctggtggtggcgcatgcctgtaatcccagaaacttaggaggcagaggttgcagtgagccaagattgcgtcattgcactccaggctgggtgacaagagcaaaactccatctcaaaaaaaaaggaattgtctgtacagattcctgagtctatagcacagttaagatagacatggccccctattctgatatattcatgtgttgaccagggtgcatttttgttcatgctcattgacatggtggaactgtgcctgacttgagatttatgggtagcatctaacaaacataaagggtttagtggtgctgccacctgcgtccagttattttgtcaatattttcatgagtatacaaacatgcatagtgttggtgtggttatttggagagaactacatttcatactttgtttataaaaagcataaaatgacaggaaggaggccaggtgcgatggctcatgtctgtgatcccagcactttgggaggctgaggcgggtggatcacgaggtcaggagttcaagaccagcctgaccaacatggtgaaaccccgtctctactaaaaatacaaaaattagctgggtgtggtggcatgtgcctgcagtcccagctactcaggaggctgaggcgggagaattgtttgaaccggggagccgagtttgcagtgagccgagattgcgccattgcactccagcctgggcgacagagggggactccatgtcagaaaaaaaaaaaaaaatgacaggaaggactgaatgtgagttattagtaagtagtgtatttcacagttagataatggagtcaaagtggtcctgcttcagttggacactagatataagtggcatgcttgttttcacttgtgaaagaaaagacagtggaaggacatgtacaataaagtggaaataccacaaggtatctaaaagaggaggcataattagggtttttaatcatattttttagctctctgggaacagaaccccaccccttaaaacgtgtgtcttttgtttgacttaaatgtttctgatgtttttgggagttcatgtacagaagcatggtgtagcttgtaaagatggggggacccagaaatcatgtagttctgcccataagacaccacattactatagttaagatcacattgtaggccaggcgtgacggctcacacctgtaatcccagcactttgggaggctgaggcgggcggatcacaggctcaggggttcaaaaccagcctagccaatatggtgaaaccctgtctctactaaaaatacaaaaaaattagccaggtgtggtggcgcgcctatagtcccagctgcttgggaggctgaggcagaagaatagcttgaaaacctgggaggtagaggttgcagtgaaccgagatcacgctactgcactctagcctgggtgacagagtgagactccgtctcgaaaaaaagaaaaagatcacattgtaagtagaggatgtagaaatctttttttggcattgtagctaaagaaataatgtccaagagttgctttaggccaccaagctttggacccagttttatgcttcagcaataaaagttatttactgttttaaagaaacaaaaaaccaaaaccttgccctgatttgaaagtgcatgtagagtttttgattatcacagaaatttgttgtgtaccgtcttttttattataagttcagtgctttgaaaattagaatccaaggtgggtatggttggctcacgcctgtaatcccagcactttaggagaccaaggtgggaggatggcttgagcccaagatttcaagaccagcctgggcaacattatgagaccctatctctcatttttttttaaataaaaattaaaaaaaaaattagaatccacatatttggtgtatacatagtgtatgctttgaggaacaacaggatttctctggtgctcctttgctttctaaatagtcatagcagtgacctgtgtgattctcctacagtgaagacctaggaaaggacgttgaatttgaagttgttggtgatgccccggaaaaagtggggcccaaacaagctgaagatgctgccaaaagcataaccaatggcagtgatgatggagctcagccctccacctccacaggtgagtatggccccagccagcaggttgttaaatacccacaaagcagaagtaaaaacaaactgattattaggaacattgaccataaatccataaaactactagaggtgtgtattggtttggtattgattgttgtaatggagctttgaatttatgaaccatgaagacatttaaggctgggtgtggtggcttacacctgtaatcccagcactttgagaggccaagatgggagtattacttgaggccaggagttggagaacagcctgggcaacacaatgagagacccccatctctacaaagaaaaaaaaaaattaaccacgcatggtagcgtgtacctgtagtctccgctactcaggaggctgaagtggttcacttgaacccaggagttcgacactgcagtgagccatgattgcaccactgcactgcagcctgggcaacagcaagaccatgtctcaaaaaaaaaaaaaaaaaagtcatttaaggcctggcatggtggctcacacctgtaaccccaacgctttgggaggccgaggcgggcagatcgcctgagctcaggagtttgacactaacctgggcaacacagggaaatcccatctgtactaaaaatacaaaaaattagctgggcgtggcagcatgcgtctgtagtcccagctactcgggaggctgaggcaggaggcggaggttgcagtgagctgggatcgcgccactgcactccatccagcctgggtgacagagcgaggcttccggctccaaacaaacaagtcatttaagactgggggaaattcttatggaaatttcttacagaaaataagaacactttgttattttttgttaattggtttttaacagtttgaaatgatagtttactagtgtgcaaagtcagcctatgtagtagcaggttggggttttgtatgcttgttttaaggagcaataaatccatgcatctgactattttgagtgaacaggtgcttgttaagtatggaatttaggcatgttagagtttccttgtcaccagtatgacttgggtatagtcctttcccctggattttcagtgctggtgcttggtatttttccaaataactgattgtttactgtattctgatttgaatatttactcctctccctttcttcctttagttaggaaactaaaggttaccagattttgacttctttgttttcatttctttgaccctatgtctgtggcattctttggaatatgtttactcttggctctaatgttctcttgagaattttggagacgaacattcagattatggcctgggtcattggttcataacctgttttttcccccctcactgaaattagaaaggtccgtcatcttcctttgaggaagagactatctggtagattttccaaaatcataatttgaaatgtacatttattgattctctactgtgggtaggtttccaaggttacagccatgagtaagataggtattctgcctttgattttgttggacgaggagataaaaccacctttagtatcagttctgcattggggatggttcctggcttcatcctctgctactatgtaagcttgggaagtcattcactgagtttcctttcctggaaagcagatactcatgtgatcttctttatagggttgtgatgattaaatgagttgtcatatgcacagtgctcagaacagttcctggcacattgtaagtgctgtattgttgttgctattgttaccactactaccattattagaatatgtaccctctgcttttctattggagaatgtggaggtagaatcaaggatgtgtaatgagtactttgagttacataatgcttgtcacaattttttgttttgattagaaaataaataggttcttatataaaacatttaaaacagtatggaaatacgtaatgtgtaaagtgaaaatgcagccattcttaagtctggtgtgtattagaagagtcagctttcaattatagaaaatacaggtgagcacaggtaactcccacgcttttacccattttctttttcccttttttctgaaataagctcaagagcaagatgacgttctcatagttgattcagatgaagaagattcttcaaataatgccgacgtcagtgaagaagagagaagccgcaagaggaaattagatgagaaagagaatctcagtgcaaagaggtcacgtatagaacagaaggaagagcttgatgatgtcatagcattagattgaacagaaatgcctctaaacagaaccctcttactatttagtttatctgggcagaaccagattgttatgtcctttgttccaaagggaaaaaattgacagcagtgacttgaaaatgattctgctccctttgaaagcattcattttgctagaactgttagacacattgcagtatgctgtattgaaagtaggaatatagttttaaaaaccctttgaacaaagtgtgtgcataaccagtcatgagataaaacaacacaatgcatgttgcctttttaatgtaaatacccgtaggtatcattaatagtttcaaaatattgtggtttagtaaagttgatacctggttataaatattatgcctttatttttggctagaagaagaattatttttagcctagatctaaccattttcatactcttaactgattgaaacagattcaaagaagtatcgagtgctatgcattgaaacttgtttttaaatgttagatggcactatgtatattaatgtaaaacaatgttaatttactcaagttttcagtttgtaccgcctggtatgtctgtgtaagaagccaatttttgtgtattgttacagtttcaggttatttatattcgatgttttgtaaaactcaaataacgactatacttatggaccaaataaatggcatctgcattcttgttacacatgcctgcacagttcctgtttctgctgccttatatctactgcaggaatgtcaaattcttttcattaaaaaaagaactcggtcgggcacggtggctcatgcctgtaatcccagcactttggaaggctgaggcaggtggatcacctgaggtcagtagttcaagaccaacctggtcaacatggtgaaaccccatctctactaaaaaaaaaaaaaaaaattagccgggcctggtggcaggcacctgtaattccagctactcaggaggctaaggcagcagaattgcttgaacccgggaggcagaggttgcagtgagccaagattgtgctattgctactccagccagggcgatgagtgaaactccatctcaaaaaaggttcagaagatctccactgtttgccaaagacgagtactttcttttctttattcttggagacttcacatgtaggaagagtactttctaaaataaagctcttcctgcgtgtggtggtggtgcacatctgtgttccagctactcaggaggctgaggcaggaggatggctggagcccagaagttcaaggccagcctgggtaacatagcaagaccctgtctctaaaaaataagtaaataaaataaagcttttaatggcagtgggttttttgttcgtttttgagatgaagcctcacactgtcatctggcctggagtgcagtggcgcgatcctggctcactgcagcctccgccttccaggtgcaagcgattctcctgtctcagcctcccctgtagctgggattacaggcgccctccaccacgctcagctaattttttgtatttttagtagagatggggtttcactatgttggccaggctggtctggaactcctgacctcgtgatccacctgcctcagcctcccaaagtgctgggattacaggcgtgagccactgcgcctggcctaatggcagtgtttttaaaatttggattgtcagcagttggcctttgttgagaaaatgtgtgactttgcccaagcccagtaacttggagccttgaatttgagatgctggaaagggagtccttcctcctttctgcagtgtttgtctgggttgtcccctagtttaccaaagtccattttgaatgtaccatccccagcccaactccagcctacagatagtgccagaccgccagtaggtggagtagcactgtcttcctggtcccggacctcagagggctttgcctgttagggtactcttatcactcagagatgggccttgagttttcagagaacagaaagccattaagctgtttcccctattgtattcatgtgccctttgtgtttctggcaataatttattttatatttcaactaaattttaaatttctaattcatgtattgttccttgtgtaatttgtactgtaccattcagcttattaaccattactccttgttttccaccatttgtaaattcagcatgtaatcagagctttcagaaaaaccatgtagaagactgggtgtggtggctcacacccataagccttgcactttgagaggctgaggcaggaggatcgtttgagcccaggagtttgagaccagcctgagcaacatggcaaaaccccatctctacaaaaaatacaaaaagtagctgagcctggtggcacttgcctgtagccccagctattcgggaggctgatggaggaggatcgcttgagcctgggaggcggggtgtgcagtgagccaagattgtaccactgtacttcagactgggtgacagaatgagaccctgtctctgaaaagaaaaaaaaagtcatgttgactaagactcagccttctggagccccagagtggagtgactttcacctgtgagcttcatctgcctttaggtttttagaaggtgtttaattttcctccagaaaataatttgaaacttaactatgtaatataaaatgaaatatcttaggatgccgtctcactcttcaaactttttattctgaaaagctctctagaaatttgattttgaaattctgtccattcttacacatcatcctgcctgcctttatttttgcagtggtgccgtcataggtcactgcagccttgacctcctggcttcaagcaattctccctccccagcctcctaagtccctggaactacaggagctcaccaccatgcccagctaatttttaaaacttcttttgtggagacggtctcacgttgcccaggcttgtctccaactcctggcctcaagcgatcctcccaccttggccttgccaagtactgggattataggccctgagccgcgtgccctgtcctcaccctgctttgtagacacagttaacaatgtgttcccgatattttgtgtatgttcttttgttctttcctatttgaatgtatagtgcatgatgataagtgccagttaggtctgcggagttgtttctaatttggcagaccagtgtttttcatctttgcattaactattactacctttttcagcaggtttgttaggaaggcaggtctgactactagttgcagggatcctgtacaactagacagtgtaccaaagcaaatccaagctttccctaggtgcctagagggtggagacacttcagatcttgtgttgtattcatggtttttccatgtaaattgtctcaccagctgggagctgggagtagggcttgcaaagggagtttcctcaacagcttctttccacctccagcctgaaatatggtgttgacaaactgtcttccagcctcacttggaacagtgtggtgacaagtttacctagagaatccattgtcctgaagactactggctgctcagcatgtgccatgagaggttccaacattttaacccattaatgagataactgaccaggcaaagatcactggatgccaaaacctttcaggtaaaaggctgctgaggaacagaattttagcacaacactcaaatgttgctgcacaggtcacttgcaaaaggaaaacatcaatctttacttattttagagaggggcgtctcgctttgtcccccaggccggagtgcagtgatgtgatcacagctcactgcagcctcgacttctcaggctcaagtgatcttcccacctcagcacccctgagtagctgggactgcagatgtgagccaccacgcctaatttggaaaacaccaatcttcacaattgacagatctgactgccgccaccataatcaagtgatcaaacctagtgtcacttatgggacggcctgatgtttctgtgcttcctaagatgataccaagaacacagcagtatctcaccaagaaattgttgactggaatctaaccaagcatctagacctccagctgacaggaaatggagagggggtagaggcacaagttaacatttagaaacaatcaggtgagcagaatatctgtgatattccgtaactgccagggctcttcagtaagtgtcatttcaaaaaaggaaggagtaggcattctggggttaaaagacatttaagagacaacccaatacaatgtatgaataattttttttgcatcctagttcaacaaaaatgactataacaattcttgtaacaattggaaatttgaaaatgaaacgaatataggtaatatagaattgttttcttcagtacgataatgtgattgtaattatgttctttttagtgtattatgggcaaatcttcaataccagcaactttttttttttttgagacgtacttgctctggtgcccaggctggagtaaagtggtataatcatagctcattgcagcctcaaactcctgggctcgagcgatcctcctccctcagcctcccacgtagctgggactgcaggtgttacgccaccacgcctggctaattttttcaattttttgtagaaggggttttgctctgttgcccaggctggtctgaaagtcctgggctaaagcgatcttccctccttggcctcccccaaagtgctgggattacagttgtgagccactgcacctttctcaggctatatggggaggaaaacagcaaaattaacatttattgaacctaggtactgtgtgtgtttcattgtaccattcagctttgaaaactttcataatagaagtgaatatatgtatatatatgcacacacgcacaaatgcatatatacatacacaggcagtctattttccttttgtgcctatttgacttttccaagttttatattgagtatgtcctatgattaaagtcagaaaggcaataaaggttattaaacatataaggtggaaagagaaagtgttagtgggattctgggctcaacactgttgaagtcagctttacccatccttcttgttgctaggctgtgacttaggaaggattctctttcatttgagcctccagagaactaagccaggtggttcccactagatgaatggcccactcagaggctgccagacagcatttagttgataatagatgttcctgaaaattgtccatcagtggcatacatgtctgacgtggacttggcctacacccaaggaacatggccaaatgtaagccacttaccagccttttgtaatatacaaaaaccaaaaatgtgggccaggtgaggtggcccatgcctgtaatcccagcactttgggaggctgaggcagatagatcgcttgaggccaggagttcgagaccagtctggccaacatgatgaaaccccatctctactaaaaaaatagaaaaattagctgggtgtggtggtgcacacctgtaatcccagctacttgggaggctgaggcatgtgagttgcttgaacccgggaggcagaggttgcagtcagctgagatggtgtcattgtgctccagcctgggtgacagagtgagactgtctcaaaaaaaaataaatacatgaataaataaataaaataaaaatgtgaaaagtaaagaaaacccaaaaagatcagagaagaaaaaatgtcagcagatgtttctagtcattgtgacatgtagaggtagggaggacctcctgtttctttgcattttaaagcaatattcctgaggtccatttgaccattttgagggaggatatatttagagaagtatttttatttcacactgggagcacattatttgcattgtgctcacagaaggaacattttctttttcctgcatccaattcaaaacacattgcatccaaaagcttatttgaaaaattttagaactcaaactaaaaaaattaaaaatcaacagttgaactacggggctacaacgccactgtgtagtttggctatgttttgaagacaattatctcctggtaaagtaacattttaggaagttttgctaaatgtctctgactcatgccagttttaaaaattttaagtctagcaacaagtgatgactcacagattgggaaagattctgagcaaaagctttaccagaacgtacagcgtctgagaaggtcctcaggctttgcactttagagtctttcaatggtttactttgattctcagatcaaccagtctcaggaaatttaggcactgtgcagacgatgtcattcagccattctgtcaacacaaattgcagtgctgcactcggtggaaaacgttaccactgttgccagcctgggtggaaacctttgaaagcacaatgaactaaagactggcgtgaatgaaaacccaactcctcatgtcattttgacagcagtaggtggtgagttggagatctgagcacccacaccctgtgtgctgccacactgagaggcagatgtcccagttggttatagcagcagcttccgggaggtttggaagtcataaacaccaacctcatactgaaaagcctaatgccaggttgggcatggtggctcatgcctgtaatcctagcaccttgggaggctgaggcaggaggatcatctgagcccaggagttcaagaccagcctgggcaacatagtgagaccctatcactacaataaataaaaaattagccaggcatggtggcatgtgtctgtggtcccagctacttgagaggctcaggtgggaggatcacttaagccaggaagttgaggctgaggtgtgatcacagcactgcagcctggccaagagagtgagaccctgtctcaaaaaataataataccaaaagctccattaatctgggcatccccaaataggtcctccccattgagctgtagattggctggggttttttaccatggtacaaagttagggcagaaattcccattcctgcgtgcatggtaaggcttcaagacaagaaaagagggcctttgccagatgcagtggtttgtacctggaatcccagcacttggggaggtcaaggcaggaggattgcttgagtccaggaatttgggcaacatggtgaaacctcactctacgaaaaacaacaacaacaacaacaaaaattagtttggcatggtggcatgcgcctatagtcctagctaacctggaggctgaggtgggaggatcactggagaccaggagctcgaagctgcagggagctgagccatgatcgcatcactgcactccagcctggatgacagggtgggatcatgttacagacacacacacacaccaaacaaacagcaacaacaaaaaacaaaaacccccatggaaacaggaaggaagcaagctgcaagtatcatgtcttagccttaattcttagattggttccccaatctatccatggcttcagtgatcaatgctttgaatcttcttgcatcctcaggcctaaaggggataacaggaccaggagagattgaagttaggctcaatctggcagaaagagtggggcctcagagaagaggggttgaaaaaattcccttgggtgcccagcctggtattatatttttgagtatgaggttggtttctatgactcttagagctcctggaagctgcctctcagcgtggcagcacacaggatgggtgctcagagaagaggggatggaaaaagccctcccagtggataggacagaacgtgcatcttgagcctggtgctgtgtgtgggaggagtggcccccaggagctgagctggaaaggtgtgtgtgcttcaggtgagagactggtgctggaaattcgacaagggtaaaaactgtcataggctaaggagaaagaagtgtgggtcccagaaacttcctgtggagtttggctgccattccccttccctcataacccgttatccagtcacagctgattgataagtggcctaggactccatgagaaaacccctgaattctgtcaatacctggggtccatacagtacagacaattaaggaggtctaatggaagctagattacaaggaggggcatgaggggctccttaaaaaatcaccattgtaggctgggcttggtggctcacgcctgtaatcccagcactctgggaggccgaggcgggtggatcacctgaggtcaggagtttgagaccagcctggccaacatggtgaaaccccgtctctccaaaaaaaaaaaaaaaaaaaaaaaaaaaaaatatatatatatatatatatatagacacacacacacacacacatacatatacatatatatacacatatatatacatacatatatatacacacacatacatatatatacacacacatacacacacacacacacgtgcacacacaaaagttagccaggcatggtggtggatgcctgtaattccagctacttgggaggctgaggcaggagaatggcttgaacctgggaggcggaggttgcagtggttgcggtgagccgatatcacgccattgcactccagcctaggcaacaagaatgaaactccgtctcaaaacaaaaaacaaacaaaaaatcaccatggcgtggacagagtctgggtagggtcagctcctgggttctgggaagatgatgatgatgatggttcaggacatggtgcaagactagattgaacatgtcctgttctggcctccaagtgtgtctttgcttaacaaagggaagaccagttaacttgagaggatgataaactggaagccacagtgtagtgaaacccctcctttggaacagtgggactcaggcagcggtgtgtggagccagcttatcccagcttgcaagaactggttatacccatttctttccagctcagttcagtggccccatctttatagcttgaaattggccatgctgggagtatttataccatggtaattggcaaatgctacacatcagggctcctgatttatacaaattcctccccagagagctggttgttagacatttaccagcacaccactggactcaggaggaaaatgcccagagagaggtgaacacaaagaacattcctgcaacaggggaggacagagggggaatcagtgggggctggacattgagtccatggacagtgctttaaatcccttgagagagccccatccccatccttctcctggactgtgcatctcagacagaaggagccagtctgttgagatcactcaatacccctggagtgaggagatagaagatggggtcagggggacatttgggtaatgtagagatgagaccccacaattctgcagactacttcaaatccacctaacatcacaatagtctgattcccaagccattcattaaatcttttgaatataactgcttaatgtatttcccacttcaaggatgtacttaaactattctaatggtaaatatcaaacattttaggttgtttctgggttttgtagttgtcatttattactagtagagcaagtaataggttttagctgaccctggatgtgaatatagtttaaatcttgaaagctctaagtgggcaggtggggaaagaacagttgttattattattattattattattattattattattattattattattattctggaggcagggtattgctgtgtcacccaggctggaatgcagtggtgtcatcttggctcactgcaacctctgcctcctgggttcaagcgattcttgtgcctcagcctcccaagtagctgggattacaggcgtgcacgactacacccagctaatttttgtatttgtattttaatagagacagggtttcgctatgttggccaggctggtctcaaactcctgagctcaagtgatccgcccgtctcagcctcccagtgttctgggattacaggagtgagccaccgtgcccagccagaacagttattaaatacttgactttattgtttttgtagagacagggtcttgctctgtcacccaggctagagtgtggtggcacagttatagctcactgtaacctcagactcctgggctcaagtaatcctcccgcctctgtctcccgaacagctgaactacaagtgcccgtcaccgcgccagtttaattttttgttttttattgtagagatgaatctcgttctgttgtctaggctgaagtgcagtggtgccctcactgctcactgtagccttgacctcctgggctcaagcatcctcccgccttagattcccaaaatacctgggactacaggcatgtgccaccattggcagctaatttttaatgttttgtagggatggaatctcactatgtttcccagactggtcttgaactcttggccttaagcaatcctcccatactggcctctcaaagcactgggattacatcacactcagcccaacagctgcctttaaatgcagagagctccctttgagcatcttttcagaaggctggagatcctaggacagaatagatcaggggtccccaacccctgggccacagaccagtataccaccgcctgttaggaactgggccacacagcaggaggtgagcagaggcgagggagcattaccacctgagtcccaccacgattctcacagaagcacgaagcctattgtgaactgcgcatgcgaaggacctaggctgtgtgctccttatgagaatctaatgcctgatgatctgtcactgtctcccatcacccccagatgggaccgtctagttgcaggaaaacaagcacagggctcccactctttctatggtatagtgagttgtataattatttcattatatattacaatgtaataataatagaaataaagtgcacaataaatataatgcccttgaatcatcctgaagccattcccaccctccccatccctgtctgtggaaaaattgtcttccacaaaaccagtccctggtgccaaaaaggttggggaccgctgtagattacctaaatgatgttgggattatacgacacggttgtgattggattattgtctgcatttttgataacttcccttgaatagatgtttagcagcagtattactgcttctaagtttcgtgttcgtttgtgcggatgttgacaccgccaaactgctcttcccaaaaggatatcccaatttgcactcataccagtagcatatgtgcaactgtttcaccacagtcctgccaatattgtaatttttaaatagtagataatgcagtccatgaaatgtgatatgactgaactggcttttcctttctcatttgaaaggtagaccatttttcatgtcctggcttccctgggtatttgctctcccaaatgctggcttctagaccccgcacggagtctcatgcctgtaatctcagcgttttgtgtggtggtgtgcgcctgtactcctacgtactcaggagtccgaggtgggaggattgcttgagcccaggaggttgagactctggggtgtgtgtgatcactgtgagctgtgatcacaccactgtactccagcctgggggacagagcgacaccttgtctgaaaaaaacaaaacagcgcaactcccccaccctccgcgcacacgaaatgcttgcttccacttcccctaccctggtggggcaggggctggaactccgcaggctatgggaaggtgctggggttagcggccccagcgggtgctcagtggtgttgaggccacactgccctgggcggtctggccgggacagttcccgtgcgggctccctgcgcgctgagccactgtaggcgccttcccgaaaatctctgagcagagagggcctggaaaacagtactctctcacgcaacacttttcttggatccatcaggccctgacagataacggtttggttttcttccctatagccgtgtgacttgtacaagggattttagttgtgtccttgggcacgaagccctagtcacctctcgattccccacctatgtggcccctatggccccgctggttccaggacctcccctcgaagcctcacccaccaccctggatgcaggtgctggaaaagggaggagtccccatatttcacggggactgcctgtgatggccacaggggaggctcgccgcccaccggctctgagcctgaggcctgcttctagcctggccttgggggcctgggcgaagcgacccagcgcgaggaccagtccccaaccaacccgctcctagttctgggcgccttccccagcagtcagatgggggcttcagaggccggtgcgcggccacatggccccgggccaggcagggggtcgtggggacgcatctgcgctaggcgcacagtattcctgggcgcgggacgggcgaagcgccgtgggttccaagctgagctgggtcggccctgcagcgccggagagcaaggcggcgcagggaagggagatggggcgggatgtggggaaagctgtcgactgcttggatctctccggcccggatggcgccagctgcctccagctcagcctgcggaaatccgagctcttcccagcggcccgacggcccgggcgccccgcagaccctgggctctccccgcggtgcctccgccgcccgcccctgcgtcctggcccggcctccacgcccctccgaggtcccggcgcagcgcggccgccgccactccccccacattccagaggccgcagcgccgtctccttcctcgcattcctgcccccgcaaaggagtccctccgccccgcgcgaggccgcggcgaggagggggcgcggcccggcgcctgggagcttacattcctccgccgcgcgcgccgccgagcagggcgccgcgtcccccggcccgcgcgtggccgccggaacgaccccggcccggcgccggccccgccccgccccgcgcccaggggtcccggggcgggctccgggcttcgggcggacgatgcggcggcccggccggagcggcggcgggaagcggaggcggaggtgacgcgccagggccggcgggccgggccatgcagcgctccagggcgggcgcggacgaggcggccctactcctggccgggctggccctgcgggagctggagcccgggtgcggctctcccggtcgggggcggcgggggccgcggcctgggcctggagacgaggcggcgcccgcgctgggccgcagagggaagggcagcggcggccccgaggccggggcggacggactgagccgcggggagcggggtccccggcgcgcggcggttccggagctcagcgcgcagcctgcgggcagcccacgggccagcctggcggggtccgacggcggcggcggtggcggcagcgcccgatccagcggcatcagcctgggctacgaccagcgccacggcagcccgcgctccggtcgctcggacccgcgtcccggtcccgggccgccttcggtgggcagcgcccgctccagcgtttccagcctcggctcccggggctcggccggcgcctacgctgacttcctcccgcccggcgcctgccccgcgcccgctcgctccccggagcctgcggggccggctcccttcccgctgcctgcactcccgctgccccctggccgggagggcggcccaagcgcggccgagcggcggctggaggcgctcacccgggagctggagcgggcgctcgaggcgcgcacggcgcgggactacttcggtgagctcgctcggcccggcagttccctgcgcgcatggctggggtccggggttccgagactgcctcgggtaggcggccggatcagcggaggagagcacggggctggctgggggtgcagcagtgcacggggttgggacgaggaaggtgcatcccctggggactggggagcgcaaagggtgagtgagtgcgcctggatccccagcagcggcttcacccctgcctctgggtcccccgacacacgaggggttctggccgagtgagttgatgtgcggttcctaacttaacaggcaagtcaggttcatgggcacactgagccattttctgataattttttcttctttcttcttttttttttttctttcttcttttttttttttttttgagacagggtcttcctctgtcgccgagactggagtgcagcggcgcgtcctcggcttactgtagccgtcgcctctcaagctgaagcgatcctctcgcctcagcctcccgagaagctgggactacaggtgcacaccaccatgcccagcttttcttcttcttactttttttttttttttttttttgtagagacagagtctccctatgttgcccaggctggtcttaaactcctgggctcaagcgatccgccctcctcggcctcccaaggtgctaggattacaggcttgagccagtgcgcccggcctgatcttttcttctttgcgtttggtgctctcattctatctgatcctttcatgcttcgtgatgagcagaaaggggtgcttccccgtctgccccgccacggtatgggtgtggacagcaaccgggagatggagtggcccaggtaccaccggataccgcctgacccaggctttggtgatggtagcggctggagagggagactgtgtgagggaagaaaagcccactttgcgggagaggggaaccgtgccagtcacacggggctgccctcgcccggactgtgctgtggacataggatgtttcctaaaggaatcctgctgcaggtgcatctgcaaagcccagcagcctcacagcctccacttcccagtgtggcccaggccccctgatctctagttcttgggacagctcttggggtgagattgtgagcggggcagaggtatactgtggggcctggggcgagaacttcccaacccgccttctgtattaagcacctggctttggtggatggatggtcaccatgcctgggaccgtggctgtcctggggtttgtgtctttgagcgttcaatggtgtcagcagctcacggctgccctgaactggatcttttttttttttttttttttttttttttgagacggaatctcgctctgtcgccaggctggagtgcagtggcgtgatcttggctcactgcaacctccgactccctggttcaagcgattctcctgcctcagcctccccagtagctgggattacaggcatgcgccaccacgcccagctaatttttgtatttttagtagaggcggggtttcaccatgttggccaggatggtcttgatctcctgacctcatgatccgcctgcctcagcctcccaaaatgttgggattacaggcgtgagccaccgtgcccggccctgaactggatcttgaggggtgaggagtctgtcagtgaggggccaggtgggggcattccagagagagggaagaatgagcagaggaggccaggcgggatgagagattgccccgctcttccccctggggttgcagcccagagggctcaggtggtcgagggcatatgtgggctaagaggaggtgcgcctgctttgggatggagagcgcctcccatctgtgaggtcatggtgagactctgtggctgggcaggtctcgtggcgcctgttggatggcctgggagcagggagatgtgccaggagctgtcatctcccgtgtcaggcaggtgccaggaagagaggctggggctgagttttgaagggcatgctttccagtgccctctgcaggggagagtgcccatttcccggcccctgtgtactgcagagcccgggggaggggggtgttctgtagacacccctgaatctttatatgatataggggtggctgaggtcccaggcaggtaatgtggagatgatacaagaaggtagggtgtggtggcacattttttttctgaggagctgctaggccgggtgcggtggctcacacctgtaatcccagcactttgggaggctgaggtgggaggagcacttgaacccaggagttccaggctgcaacgagctatgatcgtgccactgcactctggcctggatgacagagtgagatcctgtcttttctttaaaaaaaaaaaaaaaaaaaagctgctcagatcgggctgttgtagcgccctgagagtgttagaggagtgatgatagaccttttttattttgttttcaagaaaaactagaaattgagattcagtaatactttcctgattttgtttactttatttttttaaacttttttgagacggagtcttgctctgtcgcccaggctggagtgcaatggtgcgatctcagctcactgcagcctccacctccgggttcaagtgattctcctggctcagcctccccagtagctgggattacaggtgcgtaccgccatgcccggctaatttttgtatttttagtagagatgaggtttcaccatgttggccaggcttgtctcgagtttctgacctcaggtgatccacctgcctcggcctctcaaagtgctgggattacaggtgtgagccaccatgcccggcccactttcctgattttaaaaaatatgggcaactatttgtttgaactatatggttctgatgatatttgactttgttgagctacaaaagtggcagtttcatagagttcaaccagaataatacagcattttacaaaagaaaatctgcaggtagcataagctcgagtgatctctgataaacctcgtcctcagagtgtggcttttttgttttaaattaatttttttttttttttagagacagggtctcaccctctcacctaggctggagtgcagtggtgagatcagcgctcattgcagccttgaactcctgggcttaagcaatcctcctgcttcagcctcctgagtagctgagaccacaggtgtgcatcaccatgctcggctacatttttttatgttttgtagacctgagatcttgctttgttgtccaggctggtcttgaacttctggattcaggcgatcctccctctttggcttcccagtgttgggattacaggcgggagccactacgcctggccagagctttttttctctctgtccaacccctcatctcttcctgtccttggccctggtaccagctgacctcttggttgctctctgccattcactgatgtctttggaactttcccctctcccctccccaagttccgctgccattagccagccaacagccttgggcttccggaaccttttcaactttggtgacctccttgccttctcttcagccacccactcccagggccacaccgttttcccttcactctagcagtccttagtggtaactccagtctgcttctcagcagttcctctcattcctgtaatcgccgtctgcccagcagaaccccgactctgagcccatgctttgaccccctctgcggccactataccaggctgggaagggctctgaggaacccctcaggactgtgggaggtttgtcatcctcaccacgcaggtcttcctgtcaccactgacaccctaagcctttgtcagtttgttttttttttttttttgagacagagttttgctcttgttgcccagggtagagttcaatggtgagatctcagctcaccgcaacctccgcctcccaggttcaagtgattctcctggctcagccttccaagtagctgggattagaggtgcccaccaccacacctggctaatattttgtatttttggtagagacagggtttcactgtgttaaccaggatggtctcatctcctgacctcgtgatctgcccaccttggcctcccaaagtgctgggattacaggcgtgagccaccgcgcctggccgcctttgtcagtttcctctcttattctctcaacaaccttcctccctcctgggacccctacctttgcttctgacttcccttggaatcttgaggtcagcagttgtagtctgtcttcaccaccgtcctgccccttccctgtaggtgctccagtccatgtgggtctgactctcctgccgtctgagaggacaagggtccttccatcaccaacctccacctcctgcaccttcagttctcctcttttcattggccccttccctttgtttctttttaattttttttttttagagacaggatctagctctgttgccaggctggagtgcagtggtgcgatcacagctcactgcagcctgaactcctggcctcaagtgatcctcctgtctcagactcccaaagtgctgagattacaggcatgagccaccaagcccagtccctgcctgcttttttttttttttttttttgagacggagtcttgctccgtcacccaggctggagtgcagtggtgtgatctcggctcactgcaacctccgcctcccagatgcaagcgattctcccacctcagcctcccaagcaactgggattagtgtccaccaccacgcccggctaatttttatatttttagtagagatgaggtttcaccatgttggccaggctggtctcaaactcctggcctcaagtgatcaaccctcctcggcctccgaaagtgttgggattacaggcgtgagccactgcgcctggcccctgcctggttctgaaggcatctgaactggctttctctgcccagtggtaaagtgaggcatgggaggccctgggcagagcagggggtacccaggaaagcaggaagggagatgaagacccagaaagctgggtgcaggctgcatcctagaaaccagagaggaagaggtgggccacccgatagcaagatcagaatggaaagtccatagatggggacggctaggagatgaccaagtgtgggccatgttctctttgttgactgaggaaaggcggggaatggggcggctggtggaggagggagaggaggttatttaaggagagagatgaaaggagaaagcaagaaggtcgggggagggcagcatggcctggagctggcagaagatttacggtccagagggcaggtggaggccatcttcatgccctgtgtggcatgggaggccctgggtgaccctgtaaaggggacacgagatgtatgggctacttgcctactgtctgggtttccaggagggctggccagggagtgccctgaggctagagccaggcttggccctggcgttgctggtcacccctctcctttccaccttccccgctgcatgctgagtacacaggtgtggtccctgattccatccactgatcataggcacctgcacagcagcgaccctcatgtctgtctgcttccttttttttttttttctttgagacggagtcttactctgtcggccaggctggagtgcagtggcgggatcttagctcactgcaacctccgccccccaggttcaagtgattctgctgcctcagcctcccaagtagctggaattacaggtgcctgccacctcgcctggctaatttttgtatctttagtagagatggtgtttcactatcatggccaggctggtcttgaactcctgacctcctgatccacccacctcggcctcccaaagtgctgagattacaggcgtgagccattgtgcctggcctcttctttttttggagacatctcactctgttacccaggccggagtgcagtgacatgatcatagctcattgcagcctcaaactcccaggcttaagtgatcctcctgcctcagactcctgagtaactgggaccacaggtgcatgccaccatgcctggatatttttaaaaatttttgtagagatgagggtctcgctgtgtttcccaggctagtctggaactcttcggctcaagtgatcctcccacttcggcctcccaaagtgctgggattacaggcatgagccactgcacccagcccgcttccttatttccttcaggcctttgctcaagtatcacctggtgagtgaggcttctgtgaatacctggtttaaaaatcacacatccttggccgggcatagcagtacctgcctgtggacccagcttcttgggaggccgaggtgggaggattgcttgagcccaggatgtcaaggctgcagtgagctatgattacaccactggactccagcctgggcaacagagcgagactctcctaaaaaaaaaaaaaaaggccgggagcagtggctcacacctgtaatcccagcactttgggaggccaaagtgggtgaatcacctgaggtcaggaatccatgaccagcctggccaacatggtgaaaccctatctctactaaaaatacaaaaaattagccaggtgtggtggcacatgcctgtaatcccagctactcgggaggctgaggcaggagaatctcttgaacctgggtggtggaggttgcagtgagtcgagatcacgccactgcactccaacctgggcgacagagcgagactctatctaaaaaaaaaaaaaaaaaaaaaaaatcctgcatctaacgccgtagcactcgtctctgcctgacgttatttgactgctgttctctgccaccttccactcgatgcaagcttcttgaaggtggggacctgggtgcattgcagactgagtggtgcctgaccttaggggcatgtgactcatctgtgtgctgactgaccaagagaataagtggaccctggcatacagaggaggacagagtgggtacagaggaggacagagtgggtacagaggaggacagagtggctgcagaggggtggtgactgcccctgagtgcccatgtggtcttcattctttgtgtctgggtcacaaaacatgttgaagaacaggatttggttcacaaacagcatgaaggattttccctcagtccaagagcaggccatggatgaaagggcttaaagcaactgtcttggtataaagataccatgataggctgggtgtggtgactccacgcctgtaattgcagcacttggggaagcccaggcaggaggattgtttgagcccaccctgggcaactgggcaacacagcaataccctgtctctacaaaagaaaaaatcagccgtgcgtgatggcatgtgccagaagtcctagctacttgggaggctgaggctggaggatcgcttgagcctaggaggttgaggctgcagtgagctgtgattgcaccactgcactccagcctgtgggacagagcgagatcctgtctctctcccaaaaaaaacctaaaagtggttgggtgcagtggctcatgcctgtaatgccagcactttgggaggccaaggcaggaggatcgctttaacccaggagtttgaaaccagcctgggcaacatagtgagactctgtccctatttataaatcaaaaaccaaaagaatctatcagaacagttgtgatggacagctttgattagctccgactctgccctgggtgctcggccaagcccttgaatcctcagacagcagcagcggcaatccctgggtcgtggccaccctgatggtgcccatgttggtcatcagtaatcgagtgatgttggcctaggaaagttagcatcccccaggtcaagcgggtgggcggtgtcaagacggggagtccgtcggtgtggcataggctgtggcgctaacccctgctctctcctgcctctcctctcctaggcatttgcatcaagtgtgggcttggcatctacggagcccagcaggcgtgccaggcaatggggagtctttatcacactgactgcttcacctgcgactcgtgtggtaggtaacctcgtgccctgggtagctctgtgaaggggacctgccacatcatccccattcccctcaaactgccttgcccctgagtccaggcagatggaccacctggctctggcccaggctgggctgtggaggactctgtctggggaggaggcatggggcccctgaggagccttttgctggctgtaggacagggctgccccctggtcgtcagctgtggatcctctgtgccacgcagggcactaatgcgctcatgtcacccagctgcctgggagcagcgtcagaagcccatgaaggaccttctgcctgtctggacatacgactaatatttctttttcctgctatctatttttgttgttgttgttgagacagagtcttaatctgttgcccacgctggagtgcagtggaatgatctcggctcactgcagcctctgcctcccggtttcaagagattctcctgcctcagcctcccaagtagctgggattataggcacacgtgccaccacgctcggctaattttttttttttttttaggtagagatggggttttaccatgttggccaggctggtctcaaactcttgagctcaagtgatccgcctgcctcggcctctcaaagtgctgggagtacaggtgtgagccactgcgcctggcctacaatttatttttgatcataattttacacccaacataaactataagtgttatagtttaacctagacaaagttataaaaagaaaaaaggaactataatccaaccaccctaataaatatccactcttggtttgcccactgttcttccagaccttgccttaatcagacatcttttatgtatttgcacgttttttaattttaattttatattttttttttgagacagtctcgctctattgccagactggagtgtagtggtgtgatctcagctcactgcaacctccgtctccctggttcaagcgattcttctgcctcagcctcccgagtagctgggattacaggcacacgccaccactcccagctaatttttgtatttttttagtgagatgggatttcaccatgtggccaggatggtctcgatctcctgactttgtgatccgcctgccttggcctcccacagtgctgggattataggtgtgagtcaccttgcccggtaaaataccctagaaacttctatcttgtacccccacttgttttttgagacagagtctcgctctccccgaggctggagtgcagtggcgagatctcggctcactgccacctccgtgtcccagtttcaagtgattcgcctgcctcagcctcccgagtagctgggactataggcgcgcaacaccacgcccggctaattttttgtatttttagtagagatgtggtttcatagtgttagtcaggatggtctcgatctcctgacctcgtgatccatctgccttggcctcccaaagtgctgggattacaggcgtgagccaccgcgcctggccctatcttgccctttttcagttgatccctgtatgtcccccatcacatttgcccaactggtattctgatttctaccactgtagaaaagttttgtccattctagaacttaacataaatgcattcctatagtgcatactctttaatggctgatcttgtgttcaatgtctttttttttttttttttttttaagaagcagggtcttatgtcttcatccaggctgaagtgcagtggcccaatcacggctcactgcagccttgacttcctgggcccaagtgatcttcctgcctcagccccacaatgagtagtgggactacagacacgtaccaccacgactggctaatttttttttttttcctagagacagggtcttgctatgttgcccaggctggtcttgaactcctgggctcaagcgatgctcctgcctcagcctcccaggaggctgggaggctgaggcaggaggatcacttgagcttgggaggttgaggctgcagtgagccatgattgtgccattgcactccagcctaggtgacagagcgagaccctgtcttaaaaaaaaaaataccagcctggccaacatagtgaagccccatctctactaaaaatacaaaaattagccaggcacctgtagtcccagctacttgggagggtgaggcaggagaatcgcttgaacccgggagtcagaggttgcagtgagccaagatcacgccactgcactccagcctgggcgacacagtgatactctgtatcaaaaaaaaaaaaaaaaaaagattcattcccgaaaatttgctgtgaattcaactgatcttcaagtgaatgtgtttattaaccaacacatgtatttacatgagcaaaatatttattcatatatttgttttggcaacctttttaaataactctgtcgacaatgtgttctgtttaatttttttctgaaattttgttattataacaataacaacataatattaaagggaaatttagaaaaccacccataacccagtgtctcatctgttggaggagggtgctgagagctggaagcacggctccatccctggtccccagcgttccagggacccctctcaaccctcacccttgcagggagacgactccgtgggaaggcgttctacaacgtgggtgagaaagtgtactgccaggaggacttcctggtgagtccaagctgtgccctggcagtgccaggggtgggaggtggggcagggaccctcattctgactcgagtggagacctgaggccaggaggcaggtgctagctgggccgcgagtgcccctttgtcacacaatgtcctggatcctgtgtcccctcccagtactccgggttccagcagacggccgacaaatgcagcgtgtgtggacatctcatcatggaaatggtgagcccctgccccagcctcctggagcccctctgacgtgggtggagtctgaggactctaccgtctcccctgctccagacctgccaggggttcagggccagagcctctcccagggcggtgctgagcctcctgcccgcgctgacccctcagtgtgccccgcccacagatcctgcaggccctgggcaagtcctaccacccaggctgcttccggtgctccgtgtgcaatgagtgcctggacggggttcccttcaccgtggacgtggagaacaacatctactgcgtgcgagactatcacacgtgagttgctggtgctgtggagcaggcgggactcgggccgtcctccctggctcctctggaagcatttttttcctgctggactgactgccctttgttcttggccttttgccttccgcctccccttgtacacctgggcttggggcaggcatgtgtctctgcctgcatcccctctcctggtggtccggccaccagctgtcttttgcctcttctctccctatcgtggcctgcatgcttctctactcctggcacaggggaccctcctggctgcagtacccaccatctttccccctcctcccctccatcccctgccaggccaggcctctttcagctggggcaggggcttgggatctctgcagcccccttctcctgcctgtctgatccctgatctgtttcctcctaccgtgactccaggtttattcctgggagctctggttctgagcagggccttccgtgggattggagtcctgggcagaggtccctggtactcagggtgaagccaggtctcacagtggtcctagctagtggtgtcccagacctggacattaagaactcacaggaaacatgggggcagatggcagagcagaacctgaaggcatcctggaggaggtgattgggtggagatgaaatgagcagtcagataagaggccagggccgggcatggtggctcatgcctgtaatcccagcactttgggaggtcgaggtgggtggatcgcttgaacccaggaatttgagaccagcctgggcaacatagtgagaccccatttctattaaaaaaaaaaaaagaagaggccagtacaggaaggcatggcagaagctgttccctgtctgccccgaggtgtgcacacagggagagagggcctgatacttgggctacgtcagtgggttcctgtgggtgcccctgtgcttgtgcccttggcctctggtcactcagctgatcacttctggtttcctttatttctctagggtttttgcaccaaaatgcgcctcctgtgcccgtcctatcctccctgcacaggtaggagccactcacccagagatgatcaggtgcctggcccagccggctgctgtcctgtctagcctgggtctagcccaggtcttgggcgacagtgggagggatgagcaggtgcttctccgcagatctttcagggctgagggatgtgtgttgtgcttgtgtacgtggggtacagctgtcccctggcacaaggtcgagggaagtggtggcccctgccgctcagctgccccactgccagcctctgctccattctccattgatggaagggccgttccctgggtcttctcagctctgcaggctgaggtgggggtgctgggggagcagatgagagatggacgtggtctgtgcgggagccacccatgggtgctacagctctcctggcctggggtcttcccacagtgctggctctgtcccaggctggtgtgcctggcaaagcagaactggcagtgcccttttgagactccaaggaagtgaaaacaggccgggcacaggggcccacgcctgtaatcccagcactttgggaggccaaggtgggatgattgcttgaagccaggagtttgagaccagcctgggccgcctagtgagaccccatttctacaaaaaaaataaaaaattagctgggtgtggttgtgcatgcctgtagtcccagctacttgggaggctaaggcaggaggattgcttgagcccaggagtttgaggccgcagtgagctgtgattgcaccactgcactccagcatgggcaacagagagagaccctgtctcttaaaaaaaaaaaggatcagtgaggtgaaaataatgtccacatccattgacaaacacgtgacactcttgtgggcctttgtgcgtactgtgggctgtgatcgtggaggacgcctaaggcccgcatgtgtctgtgtgtgtgcacctgctggagcctgtcccgccccacagaagcagcgtggcagtgctccccggggcgggcgtgcacctccgccgggacaggagcgtggtgtgtgggagtgtacactcacgcagtttgcctccagtccccacatgctcatcgtgtgtgaactccttctcttcctccagggctgcgagacaaccatccgtgtggtgtccatggacagagactaccacgtggcatgttaccactgtgaggtgagcctgggcccacaggaggctggcagctggggcaggcctcctcccacagggctctcctctctgggtgttctgtgggcttaccttatcaaaattttagttttgccaggctcggtggttcatgcctgtaatcccagcactttgggaggctgaggagggtggatcacctgaggtcaggagttcgagaccagcctggccaacatggtgaaaccccgtctctactaaaaatacaaaaattagccaggcgtggtggcgggcacctgtagtcccagctactcaggaggctgaggtaggagaatcgcttgaacctgggaggcagaggttgcagtgagccgagattgtgccattgcactccagcctgggcaacaagagtgagactctgtctcaaaaaaaatttttttttaaaatttttatttattagagacaagatctcactcttgctcagactggagtgcagtggcacgattatagctcactggagcctcaacctcctggctcaagctatcttcttatctcaacctcctgagtagctatcaccacaggctcgcgccgccacattcagctaattttgttaattttagtagagatggggtttcatcatgttacccaggctggtcttgaactcctgggctcaagcgatccacctgccttggcctcccaaagtgctgggactgcaacgtgagtcaccgcgccagcctcacctattttatggcgtctaccccattctacctgtccttttcctgccccgcagagagtgcactgggggagggagtgaaggcaggtgctccctgagcagctggaggagtcagggttgggggcctgggttcacagaggtgggctgagttgagtgatggttaggccgtagaaaggactggatttggcaagtgtctggatgtggggggttgggggttgggggttgggaggtgttcatgagaaccccagcaaagagtgagggcagggggaagaggggatgggatgctctcatttttggtagctggagatgtccagtagacctgtaagtgggcgggggttcagcgaccctgccgacagctgtgggaatttggggtcactggcgtgtggcgctctcttctctgaatctttttttttgttgagatgagtctcactccgttgcccaggctgcagtgcagtggcactatctcagctcactgcaagctccgcctcctgggttcaagcaattctcctgcctcagcctcctgagtagctgggactacaggcacccaccaccacacccggctagtttttgtgtttttagtagtgacagggtttcaccatgttggctgggctggtctcaaactcctgacttcaagtgatccacccgccttggcctcccaaagtgctaggattacaggcttgagccaccacaccaggccttcttttctgaatcttggccctgggaattccagttgccttggcctccccagattctcaactcaaggagaccacggggctcccctgggcagctggagcagtctccaggcagtcagtcgggtgttgtggggtacacttctcagatttcccctctctgagagatgatgggcctccctggtctgttgtccggggtctgagagtcactgtcatctgtttagcctgttgctctcgttgttaaaggtgggaggggaaatccaatttctcttcctccgttctggcgggaagcaagggtcccatgatggacacagggacggcagctgaagccagggagcaagtgaggtcttccaggatgagttggaaaagaaggagtgggggtcaggatagctcagggagcactgtcatttaaggacacacacaggcgaagtggccacaaagggagactgaggaggcctgggcaggagaaccaggaggctgccggcgaccgcgccccagcaagagcagagcaagtggcggtggggaatctgcagtagcaatcagggatcccttgggtgacaaggtctcctgggtgcaggcgagtggccccatgggagcaccgattgtgtcagggtacccaggagggaggacaaggagcagggatggtctgcagaggggccagggctcccctccagccctaacaggacctccgcgtccctccacttgctgggccgtcctgtggactgtgcggtcccctgcagattgtccagtaccgagggcagcaaaaggttgacgctgagagtgagagcggggcaggcggctggtggtggtgctgtgctgccgcgaggctgttggatggggactgatacctccgggaccccgcactcctccctggcctggtgtgcagcggtcggtagcagggcccagccagtggcctgtggtgggacagacaggagaccagggaaaggagtgatgtggtgtcactgcagcagcccagctcccttccctgcgcagggcgggccaggtgttggtgtcaggggctctgggtaacgggtcaaagccgccagcattccagccccgagcccgcaacggtaaaaactgcgagatagggtacttgaagcccgccccctgcttcccaggtcctctcaccattgcctcttcagaccacccgggggtggcattcatcccttcaccctgctccagggacccctgtgtggtgggaactggtggacacttccttccgggccccccagcagcttggagcacagggccgctccctcctccacccacttgcttcactttgccctcggggctgccaggttgtggttgtcttcactttcgtttctccttgagtctcttctgcccaggcctgttctcttcccacctcctcatggaaggttctgctgtttgccgtcttctcttttctagtgatctgcaccccctggaagaggtggtctcctgttttgtctttaaaaaccatcacgtgaccgggcgcggtggctcacgcctgtaatcccagcactttgggaggccgaggcgggcggatcacgaggtcaggagatcgagaccatcctggctaacacggtgaaaccccgtctctgctaaagatacaaaaaattagctgggcgtggtggcgggcgcctgtagtcccagctactcgggaggctgaggcaggagaatggcgtgaacccgggaggcggagcttgcagtgagctgagatcatgccactgcactccagtctgggcgagactctgtctcaaaaaaaacaaaaacaaaaaaccccatcacgtttggctgggtgcggtggctcacgcctacaatcccagcactttgggaggccgaggtgggaggatggttgtgaagccaggggttcaagatcagcctgatcagcatagcaagacgccatgtctacaaaatacaaggggaaaaaaattagccgggcatggtggcacatgtctgtagtcccagctgcttgggaggctgaggtgggaggactgcttgagcccaggagtttgaggctgcagtgagctgagatcgcaccactgcattccagcctgggcgacagagtgagaccctgtctaataaacaaaaaacaggccaggcacggtggctcatgcctgtaatcccagcattttgggaggccgaggtgaaggatcacttgaggtcaggagttctagaccagcctgagcaacatgaaaccccatcactacaaaaaataaacaaaattcacagggcgtggcagggtgcgccagtggtcccagctactcaggaggctgaggtgggaggatcacttgagccctggaggtcgaggctgcagtgaactgggatccagacactgcattccagcctgggtgacagtgagagaccctgtctcaaacaacaacaaacgaataaacaaaaaacacccaaaccatcaggtttttatgctgacacccatgttgactgctcagccctctccccgcagtctgacttatatccagtgacttcctcttggatacctgagaggcagctccagtctccagtgctccacgccgggcttcccataccccctctggcagaggaagagtctttttttttttttttgagatggagtttcgctgttgtcacccaggctggaatgcaatggcaggctctctgctctctgcaacctctgcctcccgggtttaagtgattctccagtctcagcctcccaaggagctgggattacaggcatgtgccactatgcccggctaattttgtatttttagtagagacagggtttcaccatgttggctgggctggtctcgaactcctgaccgaagcgatgatccagccgcctcagcctcccaaagtgctgggattacaggtgtgagcccctgcgcccggcggaagagtcttcatgttgttttgcggcaccctgcagatctgcccctcccctccgtccctcccccgtcccgtgacctctgatgtgcgcttgtctgctgactctggggctgggggctgtgttcttccctaggactgcgggctgcagctgagcggggaggagggacgccgttgctatcccctggcgggccacctactgtgtcgtcgttgccacctgcggcgcctccaacctgggcctcttccctcacccactgtgcacgtcactgagctctgagcaggggaaaacccgtccctgggccggggtgggtgtgggtgtggagggagggcccgcgtgggtggccctggtcagcgtcaggggagctccctccaatcagtttcccaccgagctgctgtctgcaggggccggacccccgcgtggaagcttctatttattcaccgtctgtgcctgctcaagtcacttccctgcgggccctgcctcccacccaccccatcaccagctttccacttggaggccccctgtgccctgcagcctcagggtaggccgtgggtcaccaggctggagagggcccctgccttggccaggggtgcgaggtgacccggctgcattgctgggtgggagctgctgtctgttgttcaggggcctggcccccgccctcccccccgaccccgacctcgcaaagcgcactcccgggcagggtgtggtctggaaggcggggctggcggggacatgggtgttcctgcatctcctagcgcagttcctgctggtgggtggaagggtgcctggtttaggcggggtcccaggagggggtgaggggtgacacccttggggagggggcctgcaaagggcactgcctgtggccacgtggtgtctgtgggaattggtcctggggactttgatgggtgtttgcggccccagttgccgccctgctccctcttccagggctcctggcttgggccccccgacccccctgctcagctcgggaaaatccccgtgcggctccagccccgggtcacgctcaggagcgatgagaggggcgccctggccacgcttcaggaaagcctgtgtctgcgcgcggggcaaggggctccacgacaaaaggacaagatttgacttaaattaagtttttcccttgaggatattttcattttctttaaaagaatataattttcttctaagatcttggaccagccttgttatttttaaagcaaatgccggcaaactcacaagtgtctagtttgtctgttacggagctggttttcaggtggtaagaaccttgtggtttcaggacttttgtcctgaaattcctctaaaacttcgccacgcgtgtccacctttcagactttagggtagtgtggggttccgtgtgtgtccgggtgttaagggcggtcgccccatgaaatgcagtgtggaggtccctccgtgctccccgggacacactgacgggaatgtggggtctggacatgggaggccctggtcctgatgcggaatccccaggggttcaggggacatctggactgaagtcactcgcccctgggagagcctggacccacctcttggctgctgctctccccttcctcccccaccgtcaggtgtgagttctgtgaatcactcgcggggctgggctaggctccgggaaccagcagggctgtccaggccgagcccaagggaacaaacaccaggaggcgcccgcagggaagtggcggcttcggagtccagcagggccgaggcatggcgcgggcgccacctggtgggctgagccggcaagtacaggggtggtcagggagccttagccagggacttacacagcgtggagagcgctgcatcttagagtggggccttcagcaggaccaggggccacttcttggaggaggtgatcccactggggccagagagtaaagtccaggcgtggaggctccggtgctggctctctcctgctagctgagctgctttttcttttcttttctttttttttttttgagacggagtgtcattgtgtcacccaggctggagtgcagtggcacaatcttggctcactgcagcctccgcctcccgggttcaagcaattctcctgctttagtctcccgagtagctgggactacaggcgcacgccaccacgcccggctaattttgtatttttagtagagatggggtttcaccatgttggtcaggctggtctccaactgctgacctcaggggcgatccacccacctcagcctcccaaagtgctgggattacaggtgtgtaccactgtgcccggctttttttttttttttttttgagacagggtctcgttctgtcgcccaggctggagtgcgttggcacaatctgggcctactgcaacctctgcctccagggttcaagtaattctcatgcctcagcctccccagtagctgagactacaggtgtgccccatgacgcccagctattttttttttttttttttttaaagacagagtctagctctgtcgcccaggctggagtgcagtggcgtgatctgggctgactgcaacctctgcctcccacgttcaagcattctgcctcagccttccaagtgctgggattacaagtgtgcgccaccaggcctggctaatttttgtatttttagtagagtcggggtttcaccatgttggccagactggtctggaactcctggcctcaagcgatccatccgccttgaccttccaaagttctgggattacaggcgtgagccactgtgcctggccttactttttgtatttttagttgagagggggtttcagcatgttggccaggttggtgtcaaactcctgacctcaagcgagcccaccttggcctcccagagtgttgggattacaggcttgagccaccgtgcctggcctgggctcctttgccttctaactggtcagttgcaaagctgtcctctgaactgtcctctctgcttcctccctcaaacctgctttgagccgggtttctccttgttgccaacccggtccttctcctccccttcctttgcatgtgccatggtgggccctgtgcttatatccatggggttgcttcactgaaccctgctccatcccggtcaccatgcacgctcctgccagctggcctgagtcatcacagcttggagtccccccaaccccacccaagtaacacactttgtcaaaggtcgcagtcaagggactgcataggcccttggggcagtggcctcaccaggccacactctgccctttctttctgggcccctgggccccgcattgccttctgtcagggctggtggccactgctccacctcctcccccggagctgtgcatggcagttccctccgtgggagccactctcccggggtttcttcctctatgaagaaaccttggcctctatgaagtcaggccccagttgtgacacctcacttgacacccagaagtcttggcctctgctctccaagctcatttgccaacagcagtatctccatttcatgcccaggggtgacactgaccccatgattatagagatggaggatgctgtgtgagaactgggctgagccatgccagtggcctgtgaccctccagccctggatgccaccccccacctgcccaaggggacccccactgatgtggtctctgctgacacctgtgcctgtgcctggggtccctgtcatccttccctggtctgagtggcaagtctcctgccatccctgtccccgctatgcggtgagctcttcagcttgggcccgcctggtggctcacgctactctccaccgtgcctggattagggcgagtgctgaggctggagctgaccctgccctggccttcagggtcttggcttagttccacctgcactggtccaagtccagcctggttgcctagtgaaggatccacagtgggtacataaagggccaagcgctgtccacgtggacacatcctatgtgggcgtgagtgctccctgcaatccccagacaagcctgcctctcagcggggctcagctcagagacatagaccctggagggctgagtctgcctgtgtgcgtgtgtgtgtgcatgtgtgtgtgtgtgagagagagacagggatggggggagagtgtgtgtatcaatgagagagacggagaaagtcgtgtgtgaaagggattgaatatttcagaaaatgaatgagagagattgggagagatggtgggaggtggagtgggagagagacctgttgtttaagagggagactgagtgactccgagaatgagggggaaagatacggagacaggataagctgcagagagagagggagagagggattgaactggagcgagaccaacagagccctgacgctgggatttgggaggatttggtgggttctcagtgaccccactgaggcctgacccaccagtggaaaaggctcacctcctgtaagtgaccacactgtggggtgtaattgtgtgtttgtttgtgtgtgtgtgtgtgtgtctgtgtgtgtgttggcgtcgccctgatggcctcttggagggtcctggggtgggtgggtcttgggcatggggtgccctctgccctcattctttcttcatccgggctccctgcccctgttggggtgggaagcacagatgtcagcttgctgagctgcaggtaccatgacaatcccaagtggaactgctcttggggggctgtgtggggaggggccactgggcaggatttatgagacctgggcagaggtgtggggagcagtgtgggccagagggtgactgggggttggggtgagttgggtagggtgcagctgtgctcatccctcccacccagccccaccctgaggctggtctctagctcgtgagcagaggccgagagaaggcccttccccatcacggggtcctgtctcgtccggtctggcagccctcatctggccaggaggccagcaaggacttccggtgccacactcgggaggggtgagggctttgctggctgcagggttaggagtaggcgcagcctgtggggcccaggagaaccttggggtggggatcaagaacaggtctgggagaggggggagcatcagggccacctgcagcctccacccagcccagctctggaggctttgcccccaccccgcccccatggtaggcgtgttccctagaggctggtggggacctgggagaggggcatgtgcacacatttcatggggatgatgggggactctgggagccagcctgggtgggggctcagaggtgggaggggccctgaggcctgaggtggtggaaggagctcacctatctcaggcccaggcccttgccaggttcctagtccctggccggataccccagggtggcctgggatcctggagagtgctcaggaaactcaggaggagtgtggacgcggctcctctccttccacccacttccctggccctgagggcattgctgggccaccatcccagacctggggcatgtgtcacagggctgccaggagggcatagggcccaaggattccccagggatgccagcccccctgtgggccctcaggactggtagccctgggccccctggcgctttgtagggaggtgctcagcagtgatggttgtgtgcctgtcacacccacccacctgtgcctccccccacctgccacgcccattgtcctacacccagcgcacactcctctccacgctgcgcacgtgaacccgcccgggtcacacacctgccctgccatggtgacaggactgtgtgggatctctgcctccctgcctgaagttcctgccattgggacctgtcacaggcacacaggacacagctggctcaccctcttctctgacagcacctgggccatccctgatagtgatcagccctgctgaggaagggttagggtgggctgcaggctggaggccagggagaggccctggaccgggcctggcatttactcaccctcctcccatcccacactgtcccggagcctccatctccacctgagccagctgggttgatgcggatttccaggcatcctcagcgggacccatggcctggggtcaccaccttcctgagctgcgtggatctcagccaggacttctcgtccctgagaacagattggggctgggagtcccagcccgtccctggaccagccctgccatcagcttgcccagcctagttccctttctcttctgcgctctgaatgtgcactccgcgtgttcagatgctcatggtttctgatgagaagttggctgtgtctctcacggagcctctctcggaggtgatgagtgacttttctcttgctgccgtcaagattcctggctgtggattggatggatgggaagctctgtccctgaacagcccttgtgactatggggctgtccttccacagtgtgcactgagggtgcaggccaaaccttttaaagaataaacagaaagaaatcggctctttcacttcttgcaagttggtgaaaacagactcttccagggaattttaactttttatcatcctatttactctggaaagccttgtctcgtgttttagagcttgtagggtttaataaaactagttaacagccaggcacggtggttcacgcctgtaatcccagcactttgggaggccgtggcggataggtcacttgaggtcaggagttcgagacaatcctggccaacatggcgaaaccccgtctctactaaaattacaaaaactagccaggtgtggtggtgggcacctgtagtcccagctactggggaggaggctgaggcacgagaatcgcttgaactggggagactgaggttgcagtgagccgagttcacaccactgcactccagcctgggtgacagagctagacgctatctcaaaaataaataaataaataaataaataaataaataaatgaatataaataaaactggttaaaaattgagtctccctgaagtaggtgctctttcccgtgaaaactacttttttggtttggtttgaaggtaagaaagagcgggagaaactttgctcttttcatttaataattgtgttcagcctggccgggcgcggtggctcacgcctgtaatcccagcactttgggaggccgaggtgggcggatcacctgaggtcgggagtttgagaccaacctgaccaatatggagaaaccctgtctctactaaaaatacaaaatttttagccgggcatggtggcgcatgcctgtaatcccagctactcgggaggctgaggcagaagaagcgcttgaacccgggaggcggaggttgcagtcagccgagatcgtgccattgcactccagcctgggcaacaagagtgaactccgtctcaaaaaaaaaaaaaaaaaaaaaaattgtattcggcctatgatgaaatattttattattagatagcagtgtcactaataagttttaagttgtccagagttaattgtgaatatcagaacaggattcttataacaaaagcagttgtcttaagatgaatggctcatatttgggtgcagtatttgatgcccaaaagaacaaacataaaccaaaaaaaaaaaaaaaaaaattccagactgtcccctttggatgccagttgaatctgtgtcttgtgccccctgagggtctgcccggtcacatccccttgtcttctctagggttcacggggatccttctcatcctcttctaggtaccaggttccattagttttgtctgtcagtcttgtcaccagggagctggagacctggaggggagccctgatgtctgggacagtgcttgtcagtggatgggcttttgcatagggggatggggtagggagtgagtcattgcattatagacttggactaggtggatgctatttttcatggtggtggtgatgggagaagctgttgggttatttcacagaggaagcccgagctccctgctgaagatgataaatgatgcacagatttcaatccatcctacggcttcagcctccagtcctggtcccacacatctcctggagcagagcctgattcccagcctctgtagctggttgaggagcaaataggtttccctgtcctgactccaccttggagcaccttcccttgagacccaccaggctctctttcagtcacagcatcttcctcctgctccatgtggttgaaatctcaggtcctctaaggatccctcctcattctctgttagtgtgaggtgggacttttttttttgttttgagatggagtcttgctctgtcgcccaggctggagttcagtggcaggatttcagctcagtacagcctcggcctcccgggttcaagtgactctccggcctcagcctcccaagtagctgggattacaggcacctgccatcactcccagctaattttttatatttttagtgaatacagggtttcatcatgttggccaggctggtctctaactcctgaccttaagtgatctacccgcctcagcctcctaaagtgctaggattataggtgtgagccactgcacctggcctgtgaggtgggaagtttcaatactcccttagccttggtttggtcaccagaaggaggggacatgagtgaaggtcccagtccaccctatgcaagcagaagcctctttggttttagttttaaaggtgcattgacccatgtacctttgcatggacatgttcttatttggggttacctttgtgttgactttgtgtggccaggaccctggagatgaggccaggatggccgactccaaccccttagctgcttccttgccctgtatggagcagctcagcctgggatgcaggagcagctgtgtccctccgctcccgccaggcctctccccctgccttctgggactggaagttcctaggagtccggaagtgctgagctgcaggaggcttctcatggccccaggacacacccatcaccccatctatattgagatgttatctagagagacgcctgtagtaaaatccgctctgtgacggtggtgtataaacattttctgtgcaaggaccttgccctccttttcaaaaaagtaagtatgactcccacatgaaaattttcttctacaacacgacatacgttcattgtggtacatttaggaaatttaaatgatttatttcttataaaacatcatctgtttttctactggacctggcttttataaatcatgcggtgataaataatatggcagttagagctgggtgcacttggctcctgcctgtggtcccagctggctgggaggcagaggcaggaggattgcttgaggccaggattccaggctgcagggagctatgactgccagtgcactccagccagggtaacacagcgagaccctgtgttagcctgttttcacgctgctgataaagacatccccaagactgggaagaaaaagaggtttaattggatttacagttccacatggctggggaggcctcagcctcccacatggctggggaggcctcccaccaaaaggcactttcatggtggcggcaagagaaaaatgacagagatgcaaaagcagaaacccccgataaaaccatcagatcttgtgagacttattcactaccatgagaacagtgtgggggaaactgcccccatgattcagattctctcccactgggtccctcccacaaaatgtgggaattaagggagtacagttcaagatgagatttgggtggagacacagagccaaacgatatcattctgcccctggccccttcaaatctcatgtcctcacatttcaaaaccaatcatgacttcccaacagtcccccaaattcttaactcatttcagcattaacccaaatccagagtccaaagtctaatctgagacaaggcaaggcccttccacctatgagcctgtaaaatcaaaagcaagttagttacttcctagatacaatgggggtacaggtattgggtgaatacggccattccaaatgggagaaattggccaaaacaaaggggttacaggacccatgcaagtccaaaatccagcggggcagtcaaattttgaagctccaaagtgatttcctttgactccatgtctcatatccaagtcacagtgatgcaagaggtgtgttcccatagtcgtaggcagctccacccctgtggctttgcagggcatagctcccctgctggcttctttcatgggctggcattgagtgtctgcggcttttccaggcaccttgtacaagctgtcagtgtatctaccattctgatgtttggaggatggtggccttcttcttacagctctactaggcagtaccccagtagggatactgtgtttgggctctgaccccacatttcccttctgcactgccctagcagaggttctccaagagggcccctcccctgcagcaaacttttgcctgggcatccaggcattttcatacatcttctgaaatctagatggaggttcccaaacctcaattcttgacttctgtacacccgcaggctcaacaccacatggtagctgccaaggttggggtttgcactctctgaaaccatgggctgagctgtaccttggccccttttagcaatggctggagtggctgggacacaaggcagcaagtcctaggctgcacacaacatggggactttgggtccagcccacaaaaccattttttgctcctaggcttctgggtctgtgatgggaagaccaatgacatgccctggagacattttccccattgtcttggggttaaacattcccctccttgttacttatgcaaatttctgcagccagcttgaatttcttctaaaaaaatgggtgtttctttactgcatcgtcaggctgcaaattttccaattttttatgctctgtttcccttttaaaatggaatgtttttaaacccaagtcacctcttgaacgcttttctgcttagaaatttcttctgccagataccctaaattatctctctcaagttcaaagttccacaaatctctagggcaggggcaaaatgccgccaatctctttgcttaaacataacaagaatcacctttgctccagttcccaacaagttcctcatctccatctgagaccacatcagcctggaccttagtattcatatcactatcagcatttttatcaaatattaaacaaatttctaggaggttccaaactttcccacattttcctatattcttctgagccctccaaactgttccaacctctgcctgttacccagttccaaagttgcttccacattttcgggtatgttttcagcaacaccccactcccagtaccaatttactgtattagtttgttttcatgctgctgataaagacatacctgtgactgggaagaaaaagaggtttaatgggacttgtagctccacatggctgggaggcctcagaatcatggcctgaggcaaaagttatgtggtagcggcaagagaaaatgaagggtgcaaaagcggaaaccctcgataaaaccatgagatctcgtgagacatattcactaccatgagaacaatatgggggaaactgcccccatgattcaaaatatttcccattgggtccctcccacaacacgtgagaattatgggagtacaattcaagatgagatttcggtggggacacagagccaaaccgtatcagaccccgtctctacaaaaacaaaaacaaaataaaaaaaagtagctacgtgtttgggcctggctttcattatttaccaaggatcaagacctgaacatgaaaatggcaggccaagggttcctgcctttggatgcacatggccaccttgcccactagaacatctgtgccaagcagtgttcccatcaatcataggaaaataccatttcccgcatccttaccaaccctaggtattgccaataagaaaacaaagtctgtatcaatttgatgaaaataatttgaatgtgtgcatttgatgagctgtgagaatgagaatcttttgcatgcattggccatgggcttcccttttgtgagttgcctgtgaatgtccttttcccagtttactagtttgggattgaatattcttacacatttatttggtgaagaacttttatttcaaattatgaaagaaaaaaatacttgctagaattctgatttgaagtgctttcaaattctgtgttaatttggagctgacaccctttaatattgagtcctggctttgagggtctggtgcgtttcctccattcactgaagttttattttacatctctcagtaaagctttatggattagggtcttcagaagccttacttgtttttctggctctattttcttgtccagaaactccaccactgtgctaaagagacagtggtggaggtgctgggcgtgctgcttttctcctggctctaatgggaaggccaagaggcaggtcagggtcagactccaccttgagtctggcattggctgttggcatcatgaggaccccacgtattgtactttgataaagttaataaatggaattctcctttacctcaagaatgccttatgtgttgtgtgtagcatgcaccttcttgtggaaacagcttcacatgtgagagccctagcacgcaggtgatttcaggaccacccccagcccatcccgtggcgcaggatccaggcagctgcagtgcaggcgaggacccctggctgggcgcggtcctgtgcgggtccctgtgcggtgcaggcgtccatgcactctgagactctcagcctgctctgtggcctgtcacgttgtgtgtggggcaagacgcttgggtgcacatatgtgagaatgggactgtgtgtgtgagtggaatgcgctgttgggagcgtgtggggtgtgtgtgtgtggcacctgcggttggggtgtgtgactgtgtagggtggggatctgtgattatatgaatatgagggtgtgattgttgctgggactgggcacgtggctgcctctgtctctgcctctgtgtctgatagagacaggaagagatgggggaggcctggtgtgggggccctgcgggacagggccaggggacccttcctcactttacgccatctgaggaccctccccaaggggaaaagccagctacagtggaaaagcactggcagagtgggcttcgtcctggggagagaggctgggagactgcagctgaaagatgtgggctccaggagggcctcagggggctgagcatcagggtcagggaatagagggcctgggagcagagggcggccctccctccatcttccttccttctctggacttcagagcactgtgtccccttcccacttgcacagctgcaggtggagccagctggggggctttctagagggagtggggtcctctgagggccaagagggccaggtccctgaggacctgaggcccctctgggcctcccagggctgggcctgtggctctgatctgctttgtcctgggagggacatgctcagtggtggggtttgtgtagctgtcactcactcacctgcctgtgcccagccactcacctctcactcccatcagccccacccaatacacacgtggttcctcaactaccatgaggggaagttcctgcctgtgtcacacacatccatcccacccaccacactgcaggttacaggactgccccacaagtgccaccatgcccgcatgaggttacctggcacacaggtatcctcacctgcatgacatgaccagatcgtgcactttctatgccagggccagggccagggcaagcttgcaccttcagccttggggacactgggggtggtggtggctggaggccagggaagtcaccaggctggagacatcatctacctccaggagagggttgatatcagacatctcccgtgcaccactttaagccacctcagcctcacctgggaatctggctgcaggtgagtcccagcagtggaccagcatgggaccagcagttccatgaagctttagaccatctctaggcttaggaaggggctcccttgtcatcacttggtccgggctgcacgtcttgtgaccaagggctctggacggcagatgcagccagccagagcgtggggctgaggggcctgggcacaggagggatgtgagggcttccctgcacccccatggccaccatttcagagggaggacagcaattgtttgggtttgtcctgtgagtggtggcagagagcagggccctgggcaggtccagggccagacaggaatcctgtgctgcagcctcggggccacaagggcacagcatggggccggtgtgggggtgttccctgtgccaaacacattggcaggaggtgccctggggtcagtgggtatgtcagagctgtcaggcctctgagcccaagctaagccatcatatcccctgtgacctgcatgtatacatccagatggcctgaagtaactgaagaatcacaaaagaagtgaaaatggcttgttcctgccttaactgatggcattaccttgtgaaatttcttctcctggctcatcctggctcaaaagctcccccactgagcaccttgtgacccccacccctgccagccagaggacaacctcctttgactgtaattttccactacctacccaagtcctataaaacagccccacccctatctcccttcgctgactctgttttcggactcagcccgcctgcacccaggtgaaataaacagccttgttgctcacacaaagcctgtttggtggtctcttcacacgtacgcgcgtgaaatttggtgccgtgacttggatggggggacctcccttgggagatcaatcccctgtcctcctgctctttgctccatgagaaaaagatccacgtacaatctctggtcctcagaccaaccagcccaaggaacatctcaccaattttaaattgggtaggtggcctctctttactctcttctccaacttctctcactatccctccacctctttctcctttcagtcttggcgccacacttcaatctctcccttctcttaatttcagttccttttctgatagagacagagaagacgcgtattatccgtgagcccaaaactctggtgccagtcaaggactcgggaaaacagccttcccttggtgtttaatcactgtgaggacacctgcttgattattcacccacgtttcagaggtgtctgatcactgcggggacgcctgccttgatccttcacccttagtggcaagcaccactttttggggggcaagcaaccccccaccccttctctccgtgtctctaccctctcttttctctccactttcttgtggggaaacactccccactccttcttcactttcctctgggtggcaagcatcccccaccccttctctccctgtctctaccctctcttttctctccactttccagggggacaagcacccccctccccttctctccgtgtctctaccctctcttttctctggacttgcctccttccctataggcaaacttccaccctccattcctccttcttcttccttagcctgtgttctcaagaacttaaaacctcttcaactcacacctgacctaaagcctaaatgccttattttcttctgcaatgccacttaacctcaatacaaacttgacaatggttccaaatagccagaaaatggcactttcgagttctccatcctacaagatctagataattcttgtcataatatgggcaaatggtctgaggtgcttgatgtccaggcattcttttacacactggtccctccctagtctctgttcccaatgcaactcatcccaaatcttccttcttcccccccccccccccgcctgtcccctcagtcccaaccgcaagtgttgctgcgtctttccaatcgttcttctttacagacccatctgacatctcccctcctccccaggctgctcctcgccaggccaagccaggtcccaattcttcctcagcctctgctcccccaccctataatcctttcatcacctcccttcttcacacctggtccggcttacagtttcattccacgactagcccttccccacctgcccaacaatttcgtcttaaagaggtagctggagctaaaggcatagtcaaggttaacgctcctttttctttatccgacctctcccaaatcagttagcgtttaggctctttttcctcaaatataaaaacccagcccagttcatggcttgtctggcagcaaccctgagacactttacagccctagatcctaaaaggtcaaaaagctgtcttattctcaatatacattttattacctaatctgctcccaacattaaataaaactccaaaaattaaactccagccctcaaaccccacaacaggacttaattaaccccaccttcaagatgtacagtaatagactagaggcagccaagtagcaacatatttctgagttgcaattccttgcctccactgtgagagaaaccccaggcacatctccagcacacaagaactccaaacacctgaaccacagtggccaggcgttccttcaggactgcctgccccaggagcttgcttcaagtgctggaaatctggccactaggccaaggaatgcctgcagcctgggattcctcctaagccatgtcccatctgtgtgggaccccactggaaatcggactgtccaacccggcagccactctcagagcccctggaactctggcccaaggctctctgacggactccttcccagatcttctcggcttagtggctgaagactgatgcagcctgatcaccttggaagccccctggacgccgagcttctggtgactctcacagtggagggtaagtccgtccccttcttaatcaatacagaggctaccccctccacattaccttcttttcaagggcctgtttcctttgcctccataactgttgtgggtattgacagccaggattctagaccccttaaatctcccccactctggtgccaacttggacaatactcttttatgcacttctttttagttatccccacctgcctagttcccttattaggtctaggcattttaactaaatcatctgcttccctgactattcctaggctacagccacacctcattgctgcccttttccccagttcaaagcctccttcacatcttccccttgtatctccgcaccttaatccacaagtataggacacctctactgcctccttggtgactgatcatgcaccccttaccatcccattaaaacctaatcacccttaccccactcaatgccaatatcccatcccacagcatgctttgaaaggattaaacctgttatcactcacctgctacagcatagccttttaaagcttataaactctccttacaattcccccattttacctgtccaaaaactggaaaagccttacaggttagttcaggatctgcaccttattaaccaaattgtcttgcctatccaccccatggtgccaaagccatatactcttctattctcaatacctccctccccaacccctccataacccattattctgttccggatctcaaacacgctttctttactattcctttgcacacttcatcccagcctctctttgctttcacttggactgaccctgacaaccatcagcctcagcaaattacctgggctgtactactgcaagccttcacagacagcccccattacttcagtcaagcccaaatttcatcctcatctgtaacctatctcagcataattctcataaaaacacacatgctctccctgctgatcatgtctggctaatctcccaaaccccaatcccttctacaaaacaacaactcctttccttcctaggcatggttaggtacttccgcctttggatacctagttttgccatcctcacaaaagcaaacctagctgaccccacagatcctaacacctctcagcaagccagactcattgccttaactcaggccctcactcttgcaaagagactttgcatcagtatttatactgactgtcaatatgccttccatatcctgcaccaccatgctcctgctgcagttaactagcccaacctattcctttaattcagcccatccctttgtttcccataaaggatacttttagttaatttaatatctatagaaacaatgctaatgactcatttgctgttaatcaatacgtgggtaaatctctgtttggggctctcagctctgaaggctgtgagacccctgatttcccacgtcacacctctgtatttctgtgcgtgtgtctttaactcctctagcaccactgggttagggtctccccgactgagctggtctcggcattgttcctagagtgtctttgctggttttggtcctctgcattcccatataagtttagaaacaactttttgatttcaacttggagagaattgaagttttgatagtattgagtattcctctccataacgctggtacatggtgccatttattttggtcttccctattttctctctataactttttacatatatatttctatggtgctcttatacatgtagtaattgatttattccaaggcatcttttatttttaatgccattgtaaatgttacattctttaaagtgtaagtttataaatgtttgtgctgccatatagaaggttttaattattttatattgttttgtatttaacattcaaaaactctttagtctctgtagattctctaagactatttatataaatatatctaatgcatatttgtttcttcctcttcaatcttcatatattttactggtcttgctttattgcatttgtagaatctctagcacaatgttggatagcaatggtgaaggaaggcatttttattctaaactcaagaggaactttttttgtttttgctcttgatagcattgtgttttatataaatttttaaatttcacataattttaggcttataagaaagctgtgcaacattttataagtatttctggatacccttcatccagattcaaaaggatagcttttgatatttcaccattaaatagaaagtttaatataagatttttttgttagatgctctttattagattaaagatatattattctaggccaggcatggtgactcacgcctgtaatcccagcacttggggaggccaaggcgggcggatcacgaggtcaggagatcgagaccatcctggctaacacggtgaaaccccgtctctactaaaaatacaaaaaattagccgggcatggtggcaggtgcctgaagtcccagctactcgggaggctgaggcaggagaatggtgtgaactcaagaggtggagcttgcagtgagccgagattgcgccactgctctccagcctgggtgacagagcaagactgagtctcaaaaaaaaaaaaaaaagaaaaaaagatatattattctatttctatttttaagagaattaaattttttttttttttttttttttgagacagggtctggctttgtcacctgggctggagtgcagtggtgcagtcttggctcactgcagcctcaacctccagcacttaagtgatcctcccaccttagcctcctgagtagccgggactacaggtgggcaccaccacacctagctaattttagtaatttttgtagaggcagggtttctccatgttgcccaatgtagtctcaaacttctggctcaagctatctgcccacccagcctcccaaagtgctgggactgtaggtgtgagccactgacccctgtgtaaaataattttttaaatccagaaaagatgaattttataacacatctcacttgcatttagtgaaatgtccatgcaatttttttcccttagttctgtgaatgtgttaaattacatcaaataattttgtaatttgaaacctaccttgcgtttctggtgtaaattctccttaatcagcttatagtattctttatatgtaatttcattcactttgccaatatcttgcatggaacattttgtctgtgtcttcgagtggttggattttggtgtcaggatactagctcattatgaattgggggatgtagaggtgatttctatttattccaacagagctagtcttcttcttttcatagcctgctttgtaccctacgacctggcattttctggatgacatcattgggctatgttgacctttggttttctgtgggttgacacattggagatagggcaggacatgggagggaagacaagagtgagatggggggattcactcccagctgcccttctttggggctacaagttggccatggctgtgttcctctcctgtggccaaaggtcctgtgagctcaccctcccacaagtacaagtctcactggatcatagcaacagctcctttccttgcctcccattagatatttcgctcttgcttgccttgggcattttgttattggtttcccttaactttcctcacagcagagccataagcctgtgaacccaaaagtatctgagacaggtctcaatcaatttagaaagtttattttgccaaggctagggatgtgtctatgacacagcttcaggaggtcctgaggacacgtgcacaaggtggtcagagtacagcttgcttttatacattttagggagatataatacatcaatcaatgcatgtaagatttacattgctttgatctggaagagcagaatgacttgaagtggggttgggggggcttccagttcttaggtgggtttaaaatttttctgattggcagtgggttcaaagagtgattgtcaatagaaaagaatgtctgggttgtgataagggatggtggagaccaaggttttatcatgcagatgaagtgtccaggtagcaggcttcagaaataatagattgtaaatgtttcttatcagacttaaggtctgtgttgatgttaaatcctggttggtttttcctgaattccaaaagggagatgggtataatgaggcaggtttgacccctccttccattatgacctgaactagttttttaggttagctttggaatgcccttggccaagaggaggggtccgttcagatggttaggggccttagaattttattttttgtttatagccattcattaaactcttgtcacgtatcctgtgtgagtgtgccgtttccttcctgcagggacactgactgatatagggaatgcaccctgatagtttatgctttggaagaatttgtataagattggagtggtgtaagtgcctgacaggttcttcctgcctgctgcacaagcaaatcaattcatggagaccatggcattgcagtgaagaaagagtttaattgatgcgaggctggtcaaaccacaccagtgacagagttatcatcaaggcaatctcatcgaaggctcagaggccaggtgtttttcaaatatgcttggtgggcagggagctcgggtatgaggagtgctgagtggttgggttggagatgaaatcataggaagtgaagctgtctttttgcatggagttacttctggaggccacaggaacaactggtgggtccaggagaagccattggtgttagacattaaaaaaaaaaaacacctaaaaaggcatctcaaaaggccaatcacaggttctaccatagtgatggtatctgcaggagtaattggggaagttgcatatctgtgaattccagaataattgctggcaattatttaatatattacatttaatttttttattttaacagctttgttaaagtataattgacatataacaagtatgtatatctaaagtatataatttgtaacttttgtttatgtctgtatcttggccaaattaaggctcctctatcctcctagcctgatggtctctcattagctttacaaagacagttgagttttggggaagggctattatgatttaaagtatgaactaaatgtttcttttcaatgttcctcttttcactaatctattaagtcaattctaattatattttaaaatcttgtatatgttcattaaattaaatttttttgtcataatactttcattgaattataagtgacatataacaagcgtgtatatctaaagtatataatttgtaacttttgacagtggtaaaaaccagaacaaccaccataatgatcaaaataatgaacacatccctcacctccaaatgttttgttgtgcctgtgtgtaacaccctctcttgtatctccttaaccccttcctcctctctctttctcctttttttttttttttttttttttttggagacagagtcttgctctgtcacctaggctggagtgccatagcacagtcttggctcactgcaacttctgcctcccgggttatgaaattctcctgcctcagcctcccgagtagctgggattataggcgtgtgccaccatgcgagactaatttttgtatttttagtagagatggggtttcaccatgttggccaggccggtctcaaactcctgaccacagatgatccacctgccttggcctcccaaagtgctgggattacaggcatgagccaccgtgcccagccaaccccttcctcctctctaggcaactgctgatcaggtttatgtcagtatagattagtttgctttatgtaaattcaatcatacagtatgaaatgttattgtttcctcaaagagaagtcttttaggttaatctgtgtcatgtgtatgaatactttatatcttttttgagtgttaaattttaaaaaattacatatggcaaaactcagtatttatgatgtacatttccatgagttttgacagctatgtcttatgtacgttttgtattggtgtctagaatctcaaacactaccatcacaatagagatgctattttcttactttcaaacatttcttgtgttgtgcttttgtagtgaaatattctcttcgcccttaatctaattctgagtggccactggtttgttctttattccaataactttgccttttctagaactgcttatcaatgcaataatacaataagtagctttttgtgtctggcttctttcaataattttatcatttacacattctaactaggatcttacatttttaaaggtatcatgtatccttatgaatattcattttttcagatgttttaattactggaaataagattactcatcttatttcttaaaaatctggatcttatgcgccaatatatttaatatacatttttgtttagttactagatgagatttgtttttcccctccagctttattggtataattgacaaataggaattgtgtatatataaaatgcacaagtagatactttgatatacattcacattgtgaaataatcatcatactcaagctaatgaacatatgcatcatagatttaatatcatatttagtatcttaaaattaaagaagtattgaaggaagccagactcggaaggctacatattgcatgatttcatttataggcagttccagaaaaggcaaagcttttaaaagatttttgaagtttcatttactcatggtcaactggggtctgaaaacagatgaggcagtacaacaagatatataagatatatgagagagagagagagaaagaaagagagataaaccacattcacacaacttttattacagcatattggtataaatttttattttattattagcctttgttgctaatctcttcttgtgtttaatttagaaattaaactttatcatatgtatggatgtatcaaaaaaacagcacgttgtgtataaggtttggtactatgaatggtttaaggtactcattgggggtcttggaatgtatcccttgcagataatggggggctactctacactatagagtattatgaatcatggtcatcatactgtccattaaatctccagagttcattcatcttgcatagctgaaactttgtacccttgaccagtaacttctcaatcctctctcctgcttcttctgggctccctggaaaccaccattctgctctctgattctacgagtttgagtattttacataccacatagaagtcagatcatataggatttttgtcatgagtcatgagtatgtgggtctggtgcacaggtggtaaaaagaatttactaagacagttgtaggtaaagaaaggcagatttattagaaaatgtataaaactatgttgcaagaaagcaatgggcaagtcagcaagagaggtgctgactgccaggagataaaggcttgctggggattttataggatggtgcttgtactgtgtgctggagagggctatgtgcagtactctattgccaaggttgcagtgatctaacgtgcattttcctatcaatcagccgagggtctcatgataattcaggtgcaggaggattttgaattatttgtgcaggagggctatatgttccggaccgtaaggaagggcagactgataatttatctgctttctctttttgctttcccctgctcccaccagcctcactcattttctctaattagtgccccattgatttgtctttccgtgtctcccttatttttcttagcatagtgtcctccagattcatccattttattgtaaatggtagggtttccttctttttttaaaaactgaacagtagtccattatatcttttgtagaacggaaaaatgtatatatcacattttcttcatccattcatccattaacagaaagtttgattgtttccatatcttggtgattgtgaataatgctacaatgaacaggggagtgcagatgcctgtttgagatactgattttatttccattgattgtatattcaaatgtgggattgctgggtcatatggtaattccaactctatgctgcttttcatagaggctgcacaattttacgtttccaacaacagtgcacaaggttctcaatttcttcacatcatcatgaacgcttgttattttttgtctttttgatagtagctatgataatgggtgtgagatgatagatagctcatggttttggtttgcattttttctgatgatcagtgatgttgaacaccttttcaagcatctattggccattcgtatgtccttttaggaaaaatatctatgcatgtcctttgtccattttcaattggattgtttatttatttttttgctattgagtgtatgaattaattacatattttggatattaacttcttattaaatacatggttctcaaatactttctctggtctgtaggttgatgtctccagctttgtcttcttggtcaggattggtttgtctattttggctttttttgtgattccataaacactttagaattgttttttcctatttctgtagaaaatgccattgggattttcctagggattggcttgaatctgtagattctttggtagtgtggatactttaacattattaattattcaaatctgtgaacataagagttctttccatttctctgtgtcttctttaattttcttcatcaatgttttatggttttcagtgtacaagtcttttacttctttggcttagtttatcctaataattttattctttttgttgttattgcaaatgtaattgttgccatattttccttattggatagttctttgttagtatacagacatacctccgatttttgtaggtttattttgtattttgcaacattactgaatttattagtttataattattatttattagtttattattttagttattatttattagtttattttagttatttattattagttattatttattagttattatttgttagtttattattagtaattattactaataatatataactattatataatatataatataactattataatattataactatatataatatatagctattatatatataactataatatataactattataaataaataataacgaatagtaattagttattattagtttattattagcaattataattattagtttattagtttataattttatgtgtgcatattaagtctttagggttttctacgtataacatcatgtaatcgtctttttttttttttttttttttgagacaggatcttgctctgtcgctcagggtagagtgcagtggcgtgatcttggtcagcttcccaagtagctggaattacaggtgtgcacaatctcacctggataatttttgtatttttagtggagacaggtctaaccatgttggccaggctggtctcaaactcctgacctccagtgattcacctgccttggcctccaaagtgctggcattacaggcttgagccaccacgcctggtcaacatcatgtgatcttgtaagagatactgttttacttcacttttttctgatttagatgccttttcttttcttgccgcattactcttggtaggacttacagttccatgttaaatacaagtggtaagagtgggcattcttatcttgttcctgatcttagaagaaagaattttagtttctcttgattgattatgatggtagcagtgggctttttatatatgaccatatttgtgttgaggtaagttccttcaatacctattttggtggtggttttaatatgaatggacgttgggtaatgtcaggtatttttctgcatcttttaaaatgatcctgtggtttttattcttcattctgttaatatggtgtgccatgttgatggatttgcatattttgaaacatctttcatttcagggataaattctacttggtcatattgtgtaattctgttcatgtgtttgaacttggttttctactatgttattgaagatttaaaaaatctatgttcattgtgaatattagattgtagctttttttcttttcttcttttgcttttatcattttagatggacacaataataattgtatatatttatggggtacagtatgatatttcaatacatgtatacaatgtgtaatgatcaaagcagcctgattagcatatacacctcaaacattgatcattactttgcattgggaacatgcagtatctgctcttctaggtatttgaaaatatacagtaagccaggtgcagtggctcatgcctgtaatcccagcactttgggaggctgaggtgggaggatcacgaggtcaggagatcgagaccatcctggctaacacggtgaaaccctgtctctactaaaaatacaaaaaattagcagggtgtggtggcgggcaactgtaatcccagctactcaggaagctgaggcaggagaatggcatgaacctgggaggcagagcttgcagtgagctgagattgtgccactgcactccagcctgggcgacagagcgagacttcatctcaaaaaaaatatatatatatatacagtaaattgtgtaatacagtcaccctacaatcctatagaacactagaacttattcctcctatctagctgcacttttgtatccatccatcaatctttggctatattcccacctcccccaactctttcttgcctcaagtaacccttagtctacactctccttctatgagagcaactttttaaccttccacatgtgagtgagaacatacagtatttatctttctgtgtcttggcttcttttgcttaacacaatgactccaagctcatttatgttgctgcaaatgacagcattttattctttttcatagctagatcatattccattgtgtatttataccatatgttcttcatttgttcacatgttcatggacacttaggttgattccatgttttgtccattgtgaacagtgttgcaataaacatgagagtgcagatacctctttgatatactgacttccttttgtctggatgtgtacccagtaatgggattgcttgaccatatatggtaaatctatttttagttttttgaggaaccccccatagtgtttttcctcatggctgtaataatttacgttcccacaaacagcatacaagagttctcttttctttgctttctcactagcatttggtatcttttgtctttgtcatagtagccattttaactgggatgagatgatatctgaatgtgattttgatgtgcatatcctgtatgataagtgatgttgagcattttaaaaatattagttggccatatgtatgtcatcttttgagagatgtttattcagctaatttgtccatttctttttcttttttttttttgagatagagtttcactcttgttgcccaggctggagtgcaatggtgcaatcttggctcactgcaacctctgcctcccaggttcaagtgattctcctgcctcagcctcccgagtagctgggattacaggcacgggccaccacgcccagctaattttatatttttagtagaggcatggtttcaccatgttggccaggctggtcttgaactcctgacctcaggtgatccatccacctgagcctcccaaagtgctgggattacaggcatgagccactgcacctggccaagttgtccatttttacatcagattatttgtattttttttgacattgaattgttcaagtttctcatatattgtggatattaatcccttgttgaatgaatagtttgcagttttcttcccattctgcaagttgtctcttgtctctgttgattgttttctttgctgtgcaggagctttttagtttaatgtaatccaattagcctatttttgcttttgtttcctgtgctttcaagttcttcaccacaaaatctttgcccagatcaatgtcttgaagcatttcccctgctttcttcgagtagttccatagtttcagctcttaatttaagtctgtaagctattttgagttgattttattaatatggtgagatataggggtctagtttcatttttcggcatacagatatttaatgttccaggcatcattcattcaagtttttttttctcttgcctaattgctctagctaggacttccagtactatgtcaaataaaagtggtgacaggccaggcacggtggctcatgcctgtaatcccagcactttgggaggccaaggcaggcagatcacgatgttaggtgattgagatcatcctggctaacatggtgaaaccccgtctctactaaaaatacaaaaaattagctgggtgtggtggcacatgcctgtaatcccagctactctggaggctgaggcaggagaatcgcttgaacccgggaggcggaggttgcagtgcgccgagatcgtgccactgcactccagcctgggtgacagagcgagactccatctcaaaaataaataaataaataaataaaagtggtgataatggacgttcttgccttgtttcaaatcaatacatgtaacacatcacatcaacagaatgagtacaagaaccatatgattatctcagtaggtgcagaaaaagcgtgataaaattcaacagccctttatagtaaaaactcttaagaagctgggtatagaaggaatgtagcccagtacaataaatcagtgtatggcaaacccacagccaacatcatagtgaatagggaaaagtacaaagctcttccaggaaatgtaaagaaccaataaatgttcttgctgcctttgttgaaaatcagttggttgtaaatgcttggacgtacttctgagttgtctatttagtttcactggtctgtgtgtctgtttttatgccagtactatgctgttttgtttactctaactttgtagcctatttttaagtcaagtcatgctatgcctccagctttgttctttttgctcaggattgctttggatgctcagagtcgtttgtggtttcatataaatttcaggattattttttatatttctgtgacaatatcattgatattttgatagggattgcattgaatctgcagatcatttttggcaacatggtcattttcacaatagtgatccttccaattatgagcatggaatatcttttcatgttttagtgtcctcttcaattggtttcctcagtattttatagtttttttggtggaggtcttccacctcctttgttatagttattctgaagctttttttttggtagctgttttatacgagattgctctttaatttctttcttttctaatttgttgttgatgttcaggaatggtactggttttagtatgatgattttgtatcctgcacctttaataaattcatcggtcagtttaagagtagtttggtggtgcttttggggttttctgtacataagatgatgtcctctgcaagcagagacaatttgacatcttactttccagtctggatgcccgttatttctttctcttgcctaattgctctggctaggacttccagcactacattgaataaaagtggtagaaatggacattcttggcttgttccagatcttggaggaagagctttgtacttttcgttattcactatgatgttagctgtgtgtttgccatacattgatttcttgtgttgggctgcattccttctatacccagtttgttaagagcttttactatgaagggctgctgaattttatcatgctttttctgcaccaatcaagatgatcatatggttcttgtactcactctgttgatgtggtgcgtcccacttattgatttgtgtatctggaaccatccttgcatcctgggttaaatcccacttggtcatgggaatgatcactttcatgtgctgctgaatttggttggctagtattttgtggaggatgttgacatctacatgtatcagggatatcggcctatagttttctctctctctctctctcttttttttttgctgtgtgctcctctggttttggtatcaggataatgctggtcttgcaaaatgaatttggaagtattccctactcttcaattttctggaagagtttgagaagaattactattattttctcctaaatgttaggtggaattctgcagtaaagccattggcatctaggcttttctttgataggacacattttattacagattcaatttgtttgagataggagggctagatgggactgactgactagttctcctcacagatcacacatgatttggtaaagtagtttcccttgagggcaggcttttgttatatagcacaggatactttgggcttacttcaaaatgcttgtttccttgggtgtgtttcagaatgattattttcacccctcctcctgtctgaagcatgagataatttttctccagtcttcatcatgagaatcttgtgtgtctcctggaggaaaaatctcatgaaagtatgggtgctgaccccattatgagactgggttcccaggttttaagtctcaagcttgtccacccttagcctccggcaatttaattactgttcacctgtccctatcagttgctggttcccaaggcttccactcctcaaaatctgatcctctatatttgctgtctctccagtttggggggcattgctttgccctatgaactcaattctctgaagaatttaagaagggctattgattttcagtttgttcaaccttttgttgttgtgaggatgggagtaacaagctctttacatgctggaatggaaaccagaagtctagatctatattttctatttctcgttatcaagttctctttcccctatacttttgtcaatatctccttttcatgtggaaattttcagaagctttcacaagccaagctggagcttctatcccagggctacataatagagttcagtttgtttatttatttattttttttgtagagacaggatctcccttttttgcccaggctggtcttgaactccagtcctaaggtaatctgccctggcctcccaaagtgctgagattataggcatgagccaccatatgtgaccttttttttgtttttaatgctatcttgatctagttttgaagccctggcaagaggctggtgagttccctttaatgggctctcacattctgggtcactatgcacaagctctaatcaccccagggccaggtaccagacagctagggatgacccctattccctgaaacctgtgaaattgttcaaactcatcaatccacagggagcctgaaacctaactagctccactaaccctgcttgccatacataagcagccctctacagttattccttactgttaccctgtccctgggtgcaaccccctgcatacccttgcctgacagccttctcccctttggagctgtaagtaaccaagcgttctgcttttcatgtgtctgagtgtcagcatgttatatcccaccataaaaagaacctttacatcttgtaaaacaggctgtcctttgacttcaggattttacccttccaagcccctcgagttctgtttctaaccaggtacttcctgggcatctacctccagcttagaggtgtgggttaaggctcccctaagggtttgtacctaaaagtatgaatcagtttccaccatggtgaatctgggcaattttataatagctccaggcatggttcctacagagactggaagactatacagtagtggctggatgcctgcaacagtgtaccctgtaggggagacccacccttcagtatgccatagctatgaccaatactggtttccttatttatgacccaacctgtccctagggcatgaagaggatgcccctttgtttccaagttgccttttactcttggtatgaaatccaaactcctagtgtgtctggaacgattccttaggttccaacccttcccctgccatgatgaatgcttctccaactataccccaaactacctccacccaacagatctccctaaagcctagtccattgagctgccaggcctttgttcagatatcttctctgccaggagcaacctccaaggaatttgcatttcttccaggtttccaggtactgctgatgttgctggtatggagaccacacattttaatgtaataagtgatttattcacttactataaaaatttacatattctctgaacatttcctgtgtttatgtcttggactttatttcattgcttcaattctcccaagctttacaaccaggaaatgggttggtatatttcatattaaactgatttaaataactacaaaattagcaaaccaaggtcagtgacagataattgcagattttcagtcacataaataatgactaattgtcaatgagtaattttgtatagtactattatttttactaaaataaatttttaagggagaagtaaagctgcaaataattaagcaatttgtttatacattgggatccaccaccttccagaaagtcacattcttctcagtgtaagtggtgagcacttacacactttgtcctgtctacctttttcttgacatgttccaatcttgccatgtaatttccattgactttctatactagtgggttctaatagaaataggttgtctcagcttcgagggagattaagcttagcaggtatggtttgaggcactctgaaaattaccctgagaaatacattaacttacatggttggggccctccctcttgccaaactgctattagaataaaagatgaggcatctaatttcccaataaaaagaaaggcagtgtatagggttttttcatttcattttttattgtaataaaatatgcataacataaatgttaccactttattttcaagtgtacaattcaggagcattacgtacgttcacaagcttgtggatccactagcattatctatttccagaacttttcatcatccccaaccaaacctctgtatccaataaacaaaaattctcccttcctctctgcctctagcccctggtaacctgtaatttttgtctctatgaatttgcctattctaggatagaccatattaggccacaaaacaagtcttaataattttattttttaagtacaatttccattttatttttccccagagaatagtctgtcttcagtctttaaggactaagctccttacatgggctttggtgggggtcatggggaagcacccgcaggtctaaatcggggagggggtgttgggtccttgcgggcttcatgagatcgattcctgactactttgctgtgaattgcacaactcacacagtaatgtagtttcacatacagcttgggaagcacataggcattgaaggtgcttgcttcagaaatgtccctgactgccgcggcctccactatgtttcaaatgatgagtttttttctttttttttttgagacggagtttcgctcttgtcacccaggctagagtgcagtggcacaatcttggttcactgcaacctccgtctcccgggttcaagcgattctcctgcctcagcctcccaagtaactgagattacagactcctgccaccacgccaggcgaattttttgtatttttagtaaagatggggttttaccatgttgggcaggctggtctcgaacccctgacctcgtgatctgcccaccttggcctcccaaagtgctgggattacaggcatgagccactgcacctggccccagtgacgagtttcttaacggctttgtacttgggcatgcatcgggcacagttcatgcagcaaataggctgcatgtggccgcggccctttttggcatgattgttgttctttcttttctttgtcatctttgaggcacaatgaccagagagaggtagtcttaataactttaaagattgaaatcatacagtgtatcttctgatcacaatgtaatgaaacactagaaacaaatagcagacagaaaacagtaaaattcacaaatatatggcaactaaatggcacactcaaatcacagataggtcaatgaagaaatcacaaggtaaattaggaaatatcttgagggatattacactacctcatatacttatccttttttgtggtaagaacacttaaaatttactctcagaaatgttcaagaatataatgcattaactgtagtcatcatgttgtgcaatagctctcttttatttctcccatctaactgaggttgtgtatcctttgaccaacttgggaccccttagtccctattaaccatcattttactctctactttcatgagtttgacttttttagattccacatataagtgagattatatggtatttgtctttctgtggtttataatttttttatgcatttgtctttttaagttgtgtcaaaaataaaaacgagttacaaagcaaaattaaattatatatatttacatacatatgtatatatatgtaaatatataaatgaatatatataaatatattcatttatatatttatatatttacatatatatatatatatatatatatatatatatatatatatatatgtatatatatttacaggcgtgaaccactgcacccggccaataatattggtttttatatctgtccatatacttaccagagaactttatttcttcacataggtttgaattactgtctagtgtcttttcatttcaatctgaatgacccttagtatttctcatagggtaagtctactggtaatgaacattcatggcttttgcttatctgataatgtcttcatttttccccacttttgcaggaccattgtgctagacatagtatttttaattaacaggtttttccttatatcactttaaatatatcataccatttccttctggagtgcagggtttctgctgagaaatgacttgatgatcttattgaggatcctttacaggtgatgtgttacttttcttttactgctttcaagattctgtcatttggcatttcactattatgtatctcagtgggtttatcttacttggagttcactaacgtatcgaatctacacattcatgtgtttcctcaaatttgagaagttttcagtcaacatttcttaaagtaattctactaccttctctctctattttcctgggaatcccataatacatatattggtccagtgatggtttcccataagttccttaggttttattcactattcttcattctttttactttctattgctgagatctgatcatttaaaatgtcttatcttcaagttggctgctgaagtctgctgttgaactcctaattttttcatcttgactaatagattaatatatttttcagcttcacaatatctgtttggttcctttctatagtatctatatctttttgttgatattctcattttgttttaaatcatttccctgatatcatttagttctttgtgtttcctttatgtatctgagcccatttaataccgttaatacagttactttaatatctgagcatatttaacacagttgtctttgtccagtaaacccaatgcctgtcttcagagatgatttgtgccactttgtattcatcttttgaatggacaatgttttttctatttctttgattgccttgtgattgtttaagtgaaaattgggcatttgaaaacaacagccacatctctcagtctttgtatactgggtctgtttcaggaaagtcctttaataattagctaggaatgttctgtgccttgggatcagtatgaggaaaaagcttaaggttcttgggtattttctgagcatatctcttggttgggtctgtgtgtgtttttttcaatccctctgtatacacagctgcttttaaatgtcttatttttccaaagagtctccccctgggttgtcttggagacttagatggtgtatacatatctccacctgtattcttttactctatgtgtctacaggtcttagtgtccttgcagctttcccaagtagtatttgatgcttcttgctgtctgagatctgaattaggtgaggtagagaccagtcctgactctgcaagtctacccccaccacttcccattattgatgctacagattagatctttatacattgtgttcccaataacaggctaactatttttatgcatttgtcttttcaatcctgtagaagataaaaaaaaagtggagttacaaaccaaaactataatagtattacattttataattcctcatgtatttacctttactagtgaactttacttttccatatggctttgagtgacagtctggcttcttttaatttcaacctgatagacttccttcagcatttttttttcaggacatgtctagtgataatcaactgcctcagcttttgtttatctgggaatatgtgaatttctccctaatttttcaagagcattttgctgaatataaactctctattgacagctttttttcttcagcactttatgtttattgatcagcttccttctggcttctagggtttctgatgagaccctggttgatagtcttgaggatcccttgtatgacaggagttgcttctcttttgctattttcaagattatctgtctttggcttttgacatttgattatgtgtctcagtatgggtctcttttcaattctcctacctaagagttcattctgcttgctggattgcaaattcatgtctttcatcaaatttggagatttttcagccattatgtcttaaaatagtttctctgcccctttctctcttttccccttcaaggattcccaaattgatgttgtgctacagttccactaagctctgttcactcttctttttcatgttgataatttatatttgtcctatttttaagtttgctgaatctctcctctaattgcttatcttttgaatccctctattgtattcatattttttgtttctgttactgtaattttttatccagattttttgattcttttaaaaaatcatttcatctcattatttctatcctcagtttgctcatacatctttttcctttgttcatatatttctttagcttttaaagcatctttaagacagttgtctttttatagtgagtctgacatctgggctgcctcaagtatgttttctgtcaattcattttgttcctttaattgggccatacttttctgttttttggcatgccttcaggtttttgttgttgttgaatactggacatttgaatcttacaatatgatatctctggaaatcatatttccccccttcccctggatttgctgcacttttgcctttgtttgtattattatgagataactgtgcaccagagatcagcctaaaataaaagctgaagaaggttttttcagtgcttgtatctttccatgagcatgtgaggcggctttctgaattcttctgtatatgtagttgtttttgaattaaaaaaaataggtgcaagtctttaaaatctcctgaaagtcacttcatccagtgggggttgaaacaatgatgactagcctacaagcccacaagcccacaagatcagaagcaccaatccacagtcagaacacagaaccatatggccttgtcattgtcttgtatcttgcatcaattacttctgcatatacagcttttttcctctaacacaattgcaatttgtttaaagactgactccccctcaacagcaaagaattaagcgtccaggaagtgctcagtgatatgtgccttgattctttctagatgtttaccaacaactgagctctaatcacatttgactggcccaaggctaacaaggaaactttgactttccaggcatcggtgatcttcaatgacaggctgtaacctctactcaggaagagtgagggcagtggcacccagtccatgggactctgtactcagagatgatgctgaagacctgtagtcctctggtctccatgggtaaagcctcccctttcctctatgtgaagcctgacagcctccttcagttggccttttttccagctctgtagggcaccgtccttccttctcacagacctgctgaattctcatctcatctcctatctggtctctttgtttcccctcaggttattttgggcgagaaacattccctcaaaatggctcagatactaaaggatttgttgtaaggaaatgggtgcattttgtaagagctccctcaaaaatgtgaaacagtaaatacataagagcgacaagtgattagatgtgacatctgagaccagaatgatgaagcaaccatgagaagacaatgatgatgaaatcaatagctaatacttattgaatgctattaagaggccaggcattgttgtaaacactttgcatcaattaactcatctaattttcataataatgctgtgagatagctttattaccattttatagatggagaaactgaggcatgacatagtgaagtagtttgtccaaggtcacacaaagccagtatacatgcaacttggatttaaacccaggtaacatgactccaaagcttaatgctcttcacacacacaccttggagctattaaagggtatgcattgtttatctattaggtccacagtggatgcttaagaaatggttaataggtatgactgaggaaataatatgatgtcagtgacatcgtaacatcattatgacatcagcccaaccttctatcataacaaagtcatggtctcttattgctcttaaaagcttcatatcttaatttaaaaatatggccttctggctgggtgtggtggctcatgcctgtaatcccagcactttgggaggccgaggcgggcagatcacttgaggtcaggagatcaagattagcctggccaacatggtgaaaccctgtctctactaaaaatacaaaaaattagctgggtgtggtggcacatgcctgtaatcccagttactcaggaggctgaggtaggagaattgcttgaacccgagaggtggaggttgcagtgagctgagattgcaccatttcactccagcttgggcaacaagagtgaaactccatctcaaaaaaaaaaaaaaaaaaaaaaagatggccttctttttcctaattctgttattgtgaaggcactttaattccagaaatgtaaagcattattatgtgtatgctcatgctttttaaatgacaaagcacaggtctttggatgaatcctgtcataacaaagtgacatggtggcataaaactatgtgtagtggaaacaaaaaaaatctgggcattataggactacttcatctttgtggtaccagttccttgggagagctgaagaaggacagagaatgagagaaaagaaagctactgtcattatcccataagtatatatgtggtagccagactatccataattacagcagtttgataccacgtcatgcttccttagttatatttactttggagtcagagtggtgtcctgctgccaggctggaaagcagtggtgtgatgatgcctcactgtgaccttaaactcctgtactcaagcaatccctccccactcagcctcctgaatagctaggactgcaggcatatgcctacacctgggtaattaaaaaatatatatttttagagatcgagtcttgctatgttgcccaggctggtcttgaactcctggcttcaaacaatcctcctgccccagcctcccaaatttctgggattacagatatgttccattgcacctggcccttccttacttataagtctaagatccctcaatgtttcatagaatttcaatataaatttcaggattaaaattaaatcaaatgaaagataaaatccctgcagaatagtaaaaatttaccaccccattccaaacctactgtctctattccaaagtgctattggaatatgcctctatgcttttagctttcagttaaggtagtacatgtatcagaggagatatgttttgttgaaagtcagaaaccttatcactcattccacaccagaattattgtatgtataacataatgttccttttaaaaataacatatcttatgattctcacctgccatagtgaacaaaatctgaagcataatccatatcacagcccttcacttacatcagtgtccatacactccaaatcaaattgatctgcattacctttctaatcacaagataggattctaatcacagggccagtgagaccgttccatttcctttttttttctttttttttttttgagacggagtctcactctgtcgcccaggctggagcgcggtggtgcgatctcggctcactgcaagctccacctccagtgttcatgccattctcctgccttagcctcctgagtagctgggattacaggcatgtgccaccatcctcagctaattttgtatttttagtagaggcggggtttctccatgttggccaggctggtctcgaactcctgacctcaggtgatccacccgcctgggcctcccaaagtgctgggattacaggcatgagccaccacgcctggccccatttcttatctagaacttagaatatttgaagccatcctccctacttacaaaccataactatctgtcaagtttcagtgcagagaacaaaaactctcttaactatttcaagacatatattgcagtaaatcagtgatttcaaaattggtaggtgggctgtaaaagtaatgggaacacttctggactagtgatttcaaggtaaactcctataactatgacccagagatggagaaatgacagttgctgaaaccaatgatgctgccagcggcactacctcaaagccacagaatctgaaactagacatgggaacatggaatccagctgcagcaagtatgacagaacttgactatccactttacctagaataacaccctgtgcaccacatacacacacacacaggcacacacagggatgcacatggctacatgagtagtactcattacataattagtgttcatcatttaagattcatttcaaaaatcacatccagctaagcctgctctgatctcttgtagtatgttgtttcttagttattttctcatagcacttgtaaaggattatttcaaatttatttgctatccatttctcttgtcagataatgtctctgtgagaaaaagaccacatttgttaattattacaatggttatcaaaatgtgctttctggacaaaacagtgttactgtcacctaagaatgtgtgaaaaatgcaaattcaaatcaactcatacagaacctagaactgaggctagcttgaggctaaagcaatctgtgctttaacaagccccctagtgattctgacacaccactaaagctcagaactactggattcctgtatcccattgctgtgtaatacacacgagtgatgctcagtaaattttcttgaaatgtagtaagcccactggaaatggactccgaataatcctcaccaaaataccgctattcttagtaaaaagagcaggtgtttttctttaggtttgcttgtctcccactaaaggctatactgaggctaatcttagtgaaatttttttgccagaaatagtcacagagaaagagtacgtgagatacaaaatgattttattagataccaaaacctttattcacaccattttatttcttttgcagctttaatttttaacattataacatttactggctcctctgggtgactaaatatcttcacatgcccactagctaaaaagaatttctaagtagaactcaactgaaactgcaagctactgctctaagaaatgcataatgacatttatttgctctcctgtagaaccctgtttacaaatagcatcactgcaaagatttacacgtaattcctaaaactttcaggttgttcttccattaatcttctgatgtgtagcaagataaacactcttagtgaacacttggctacatctcttaaatgagagttctctccagtttgagttctttgtaaaataagggatgcacttggaactgaagtcttccctcaatttctaaattttctacattcatacagcttctctcctgtaggagtttgtaaaagattcctattgtctatagtctttcccacatttgctatatgtacagggttttatcctagtgtgagtatacttatgtcaattaaggggttaatactgacaaaggctttcccacatttatggtcttcatatgatttctctacagtataaactctgaaaaataaaaacatctgaatcattgctgaaagtcttcccatattcactacattcataaaacttttccccagtataattttttctgatgttaaatgaggatctatgaatgaactttaccatgataaacactgcttcatatacattctcttctgtaagatttctcacatgtatagtgattcatatagtctaaaggcttttccacacttaccacactattgggtttctctccattatgtactctttgatgggcagtaagatttgagcctttgctaaaagctttcccacactcactacatttatatggcttttctccagtatgaattctctgatgtacggtaaggtttgaactacagctgaaggtcttcccacatttaatacattcgtaaggtttctctccagtatgaattctgtgatgttgaagcagggatgacctatgactaaaggctttcccacatatatggcattcattagatagaaatcacatttcaatctaatgtgatttctcaaatgcatattcagtgattcaagctggttgaaggatttcctgcatttctgacattcaaagggtttttcttcagtatgaatactctgatgctgaacaagaaatgagaggctactaaagactttcagacatttgttgcattcatattgtttctccatagtgtgaattctttgatgtggagtaaggtgtgagctacagcagaaagctttctcacattctctacattcataaggcttctctccagtatggattttctgatggtgaatgagagacgacgtatgaatgaaggcctttccacatatacgacactcatagagtttttcttgcgtatgaattcttagatgttcaataagatgggacacacgcctaaaagactttccacagttcatacattcatatggtttctctccagtgtgagtgctctgatggttagtaagtgatgagccatggctaaaggccttcccacattcaatacatttgtaaggtttctctccactatggcttatctgatgtcgtgtaagggatgagccgtggctaaaagtcttcccacattcacgacattcacagggcttctctcctgtatgaattctccagtggcgattgaggattgactgtttgccaaaggctttcccacattccctagatgtatagactttctctattataagtgtggtgaggagaggtgctctggttaacggctgctccacttttattagaattcaagagtttctttccaccattgagtctctcattttttacaactgacttttttggtaaattcttctttaatatattgtatttgtgtgaattccctttagcagaatttttttatggttcagaaagagtagactttgaatgaaaggtgattctaaatgtgtcatatttgtaactgtccccagtggggctttctctagaggtgagagttgctggtctgaaatgttctacatgaattccaggcttcccttccaacttttctatgtgttccaaattcttggtagaatttgaaaattcataactttgttttaaaactttttctattgttactgtttggagtgaatcttccttataaatatccttctttgttgataattccttgttttcccatcttgattcccaacctgaaatatataaagaaagcaaagtactgtttttttctttttttttactccttgaaaagaaacttctatggtggaattaggagaaatggataagaattgaagcccccagaaaacacagagttctgacaattcaaatatttcagtgatttctgaacaatgctcaaatggagcagagaatacagagttcacagaagaagcaggagtgataacagaaatgggtaaaatatacataatagataaaacagtatatgaataaaaggaaactatcagaaataaaatgtggaaggcattctggattccaagccatctctttgtgcctatattcatgtatgaaagattgcattttgtctcatagcctttttctccaaccttccattaatctcaatttgctgccagattaacatgcttaaaatacagaattgatactactgcattaaacagttgcaggaaaaacaaaataatctaagtgctgtttagagctgacaaagatttaggccttctgaggttatgaagaaactgtgaatcatatcagttattggacattagaaaatattattcctaggaacatattttatatgttccttacttcctctaatatgttcatatttcatctacaaagctcagctttagaaaagtgattttccatctaattgtcagcttttcttagcctaaaagtatcagtttgttttttcttatgtagatttaagaaagaataatttgccttactttgtcatgaatagagtaacaatttgaattattataatgacaaaaacctctaaccttgattagatgacatgagtgatacagataataatgtgggatagaggaacaattattttgaaaatctaagctaaatatccctcaatttttcattaatatttgagatatttgaagatagtgttcctaaaatgcctccacactcactataaacatctttaaccaaatcttcctttgtctcattcaccatgactcacctggaatcataccttttgacagttttttctccaccatccagggctctttcccatgctccaacaatgtgatcacatatggcttagttatggaaagacctgcttacaggaagaatatagaattgtttaagctgtggtcttctattatgagaggccatcaaaagagggaccacaggaatggatgaagggtgttcattgaaatggaaagataagctttaggcagggcacaacagagctgcacatttcctcgggagcatggtacagaattcagccgtttacttaggagaatctccagcaattcagggtggcaaaagaaaggtgtcccctgttggagtggaaggggtgatatccttacctacagagacaaggttctcataattctggaccatcacatccttgtataagtccctctgagcagaatctaggcatgcccactcttcatgagagaagtctatagccacatcactaaatgtcacctgaaatagcaaatatatttaggctcagccatagcccaggcctcttctgtcactgaagaagaggtaaaattagcctggttgtggaagaaatggaacaagattcaggagtcgtgacaaagattgggaatgtgatctcagttaagtaataataggacagttacgtagatggaattattacataataaaggggagagttatgtgtttagaattattatacaataaggatgagagacaaatatgagagctttgcttcagtagagttaactttttgttaaaagttatagaattgtatgaatttttaaaaatcagcatttaacatttgacagcacagagtcaagtatttggttatatattttataccttaagtactaggtaagtaattaaaaaatgaggctaaagcgattctctcttgaatgggataccaggatgatccactaaccctcataaaaaatgggtttggaaaaaagacatctttatattaaagactgatagacatacactgttatggtttgattgtgtctcccataaagcatgtattgaacttaataaccgttctaacagtattgagaggtgagatctttaggagacgattaggccttgagggctctgccgtcatgaatggattaatgtcatcatcgtgggagtgtgttccttatttaaaaaatgagtctgaggcccctttttcctctctcctctttttgcccatccacccatccaccataaaagcacacagcaacacggcccttgtcagacccctcccccttgatcttggacttctcaggctccaaaaccatgagaagtcaatttcttttttttctttcttttttctttttttttttgagatggagtctcactctgttgcccaggctagagtgcaatggcacgatctcggctcactgcaacctctgtctcctgggttcaagtgattctcctgtctcagcctcccaagcagctgggattacaggtgcccgccaccatgcctggctaatttttgtatttttagtagagacggggtttcaccatgttggccatgctggtcttgatctcctgatctcaagtgatccacccacctcagcctcccaaagtgctgggattacaggtgtgagccaccgtgcctggccaagaagtcgatttctattgtttgtaaattactcagtctgtggtattctgttacagcagcacaaatggactaaaacatacacataactgattcataaaaaagaaaaatatatttatggcatatacttaaactttgtactgatagacatttaataactaaaatatgagacccctgggcgaaaagactgaaggctggtttcatgtcatagatcaggggtccctaacccccagaccatggactggtactggtctgtggcctgttaggaactgggccacacagcaggaggtgtgtagtcggcaagtgagcattaccacctgagctccacctcctgtcagatcagccgtggcactgcattctcataggagcgcaatccctactgtgaactgtgcatgcaagggatcgaggctgcacaccccttatgagaatctaactaatgtctgatgatctgaggtggaacagtttcatccccaaacaaacacctcccacttctggggaaaaattgtcttccatgaaactgatccctggtgccaaaaatgttgggcacccctgccacagacagtccttaactaggacctgaaactaagcggggaacaaaagggtacatttcaaagaaaatattctaaggaaatgctcacagatgtgcttggaaattcctctcaatagtactcatttcaaagtattatttaagatagtaaaactttagaagcttaaatattcaataatagcttattgactagtcaaattatatgtgcaaaaatacatccatttaatatagcattattactgtctttgatttgtgaaagactgctctactgtggtaattttttagctctgagagttaattcagcactgtattacattatttggatattttgcgtgcatgttcaccagtgacactggtctctggttttaaaggcagaatttacttttgtcaggtgttgggaaaataattaaaattcaaatctcctgccaatggtagaaaatcctttccacagatgtagaaaagaaagaaaagagttttattactgaataagcattaaataagaccttgatgcatgtcacaggcaatccactaatgagattaaaaggacaggaagaaatctcactcatccttttatatcaccaagcagatacaatccaatacatacattttccaaataaacaataacttatccaagtaagacctgacagttcaatttgctacgcataatttgtcctaaattcacccattaattggagttgacactgttagttaattgcctttatcctaaataaaaataacgtttctcatatctttatgacagacaagtcattacaacttagagccaggaatgcttctttcttcccctgcagttgcccgggcagcttgaaatgttcactcatctctgtccccaaaagaacataggatatttgtcctagcacttatttaaatttcccatgctttcttacttttctacagtgctgcagtcctcaatacagtagccactagccaatttggctacctacatttaaattaattaaaatgtaaaaataaaataaaatttaaaattcagttcctcagttgcttaagccacagttcaagtactcaatagtcatatggggctggtggctaccgtactgaccagtacacatgcacagcacttccaccactgcagaaagttctcttagacaatactgcactagatcatgaagtcctgtgtgtcagtgtacaccacaatccatgtacaacttttcctaccaggtacttcataagtgtttagaagatgaaccaatgaatgtttttggcattagttcactttagcctttactttgttttttttttttaagagatagtatcttgctctgttgctaagctggagtgcagtgacataatcatagcccactgcagcctcacacccctgggctcaagcaatcttcccacctcatcagcctcccgagtagctgggacaacagacatgtaccaccatgccagtttttcaattctaattatctattttttccaagaaaacagacttcacccaacatgtacatctgctactcatatcccctcctatgcaagcttcaccttccatgccatgattctgccccaccagttcttcattactcatcttattcactccacagttacttactaagcatctatttggtgccaggtaccactctgggtactgaagctataatagacaacaaagaagaaaaaagattcctcccaccaggaaaagacaatgagcacgtgcatatagtgaacatacagtacatcagctagtgagtgacacacgccgtggaaaacaagaaagcagtgacggaggagtggaagtgctaggtgttcagggaagcttttctgagaaagtaaccaccagaacccaaaatgtactaaaagattggacttatgtgtccttaatgaatgtgtcaaatgagtctcctggaaggagcatgttattaatatcatgtcatacctgtgctcttagagaaagaaagatggatgcagttcagattttgtctgcagatattgtacatgatgccaaagctaacaaggtaccctctgggtggcctgggaaaggtatgttgcatgccttcagaggtggagataaattgcagtagagaggctgttgaaattggcaccaaacagatcatgttagccaaatctacaagagcaaaatatataccagtttttgactgaatagaatcagcaatgttaataatattggatattggctatggaggcctcaatggatgggaccacagcattaaggtgtagtaatccatcaggaattttatgctgtttagagaagaataaaaacttaaaagataggaaataaactaaatgaaaaaataaactaaaatatatagctgggcaaaatgtattatattaattaatgcccaaagtttgagtgttggaagagggagagttgaattaatgcagagaccatgaacaaggaaaagtgaacatgtacttttattgttaaattgtgtgatgaataatgcaattgaccattataaatagaaattcaactacatgaagcatcaatatcttatagcccatcctgaggctatcgagatgctctaccttaaggacctcattagcataaactcaggggtcatcagtggggctcactattaataacaaaagacactcctatcactcaggacattccaggggtttcagcactctgagaggaactgatgacaaagaccaaatatatgtcctaccagaatcttgcttgatcttctctcaacttccttgatctgtgctttttgatgtctgtcagtaagtttggaaaactttcagtcattatcacttcaaatcggttttctgctcctttctctcctcctctaggattcattctcattatgcccatgttacatcttttataactgtccatagttcttggatattctgtttcagttccctccctctctctctccttctctctctttttgctttccagtttgagaagtttccatcaacatgtttcacactcacagattctttccttgatcttctgtattctgttgataagcccatcgaagacattcttcatttctgttacagtgttttttatttctagcatttccttttaatttttttttttgtgtttgcctctctctgcttatattacacatgtgttcgtccatgttggccactttctccattagaatccttagcatattaatcatagtttaaaatcctggtgtgataattccaacctctctgccccagtgtctagttgtgatagctgctttgtctcttcataatgtgtttcttcctgctgcattagtcttcttgggttattcttcttaacagaatgccacagactgaatgacataaacaagagacatttattcgctcacaatcctggaggatggaatgcctagatcaaggtgtcagcagagttgggttttggtgaggactctcttgcaggcgtgcagacagctgccttcttgctgtgtcctgacatggtcttcagtctgtgagcacacaccctgggtgtctcttccttttcctataaggactgtagtcttatttgtttagggatccatccttacacctcatttaaccttaatgacctctttaaggtctctgtctccaatacaatcacactgggggttagggctttaacatgaatttgctggggagggatgggcacaactcagtctagagcatttaccttttatcatgttgtgctatttttgttgatagccagacatgatgtatcgggtaagatgaactaaggttaataggactttactgcgaggttttatgtttatctggctagaattttggctgtttattatttgctgtagcagtagatttcaggggattaaatttcctctaatatccttgttggtgtctctgctgttgtctgtgggtttccctagaaattcctgtctgtctcttgcagctctatcagttaccatctactgttttttgtttattatgatttttatttattttattattttttgaaacaaagtatccctccgtcacccaggctggagtacagtggtgcaatctcggctcattgcaacctctgcctcccaggatcaagtgattcttttgcctcagttttccaagtagctggaattacagatgcatgccaccacgcccagctaatttttgtatttttagtagagacctggtttcggcatgttggccaggctggtctcgaactcctgacctcaagtgatccacccacctcagcctcccaaagtgctgggattacaggtatgggccattgcacctggcccatctgctgttattataccgcagacctgttgatgtggtgataaggtattgtggagaggcagcatttttgaatctcatgattacatctcatgattacatctcagttttattagtgagactgagtccctgggctgaccttcagaaaaatttcttagctttcttttcttcctttatttgagataggaagactagatggaacagactgactagttcttctcacaggtcacacacgatttggtaaagtagtttcctgggggcaggcttttgttatgtagcacagaatactctgggcttatttcaaaatgcttatgtttccttgggtgtgtcttagaatgattatttccccttcctcctgcttgaagcatgagataattgttctccagtcttcatcaggagaatctggtgggtctcctggaggcaaatctcatgaaaatacaggtgctgctcccatgataagactgggctcccaggattttttaagactaaggcttgtccaccattagcctccagcaatttgttaatcactgttcacctgtcagttgctggctccagaggcttctgtcctcaaaatctgatcccctatatttgctgtgtctccagtttgggggggcattgctttgccctatggcctcgatactctgatggatctaagaagagttactgattttcagtttgttcaactttttgttgttttgaggacgggagtaacaagctctttagatgttggagtggaaaccacaaatatatatatatgtactatttctcattatcaagttttatttcccccattcttttgtcaaaacaaatgttggatagttataaaagctttacagcatatttgtccactaatttcatcattttcatcatttttgtgcttctcaattcactcttctggttaatgatttttatgtcactacttctttgtgtgcatggttattctttattggatgccagatactgaattttacattattgaatgttgtatttgtttgtattgctttaaacaatgttggaccttggtatgccattcaataaaattacttagcagcatgatttcctcttgcctgcttggcactaggtctttctgttttaaacttttttagtataagaccagagcagccttgagtctgtcagccccgttctttaggtgatacctttctatctggtgttttctgtactaataggtgttccacactggcaggtgaacatacaattcccagccctggatgagctcaaataattgtttgggatattgctttgtaggggttcctttctaaacctcaggtagtgtctggtcatgcttgtgcagatcgggacttagccaaagatttacatggatacttctgcaaatctttgcctctctcctctctcctattatcccacctaaattatacccatggtggtcaccatatatacttatttttcttctacactgtaagcaggaataattgtagggctcacgtgttgtaacctagtgagttacagagaaacaccacactctgagacgaattcaggtgtcctttattagccagcgactgagagatggctagtgctcaaaattctctaggccccaaagaaggggctagattttcttttttactttggtttagaaaggagagggggggagtctagttaaaacaatcttacagaagtaaagcaggcaaaaagttataaggataaatggttacaggaaagcaaacagttccaggtgcaggggctttaaatctatcacagggtgacagatgcggggctttgggtgttatcaaccagatgaattcctaggaactgcggatatagctttccacagtatcttatcagttaattgcatccttggatgtgttgggaatctgcttgcacaagtcaagtcaagtccttgaggaagggagtgggtaaggggctgtaagtgaaggagccaagatggagtctgtctggctctctcagctaagggagagtcaattcaggttaaaacaaggttgggtatcacattccccacttgtgtttttggggaatcaaaccattgattcctcggttataaccagggggttatattgggttttaaggtacataagcttgacagaagctatatgttgttttacaaaattaagaaaccaatttaacatacaaggctcaaagactaagcctaacaataggggagaaagggtccagctaacccagtgattagagtagttagcaatggattccagttaaacatgctttggtaccagggggtgttattttctcgttcttgctggtgcctgtctaggttttctcaaactttttggagagtatcttttatgactccagactgattggcacagaagcaacaactctctcctagagtggcacataaccctccttgggagagaaatagcagatctaagcctcggcggttttgaagaactacttcagctagagattttacttgggtatgtagtatatttatggctgattggagattgcttaaatcagcatctacttgttgagacagggacattagtccagtttctccctgaaccagggcagccatgctgatggctgctgatccagctatgctaaggccagccaggaggggtacaaggagtggggtggctcggcaaaacctgggatgtaattcagggggagcaataagaagttatccttctggcccactatacacgtagacctgggggagtacatgaaccaacacacacaggagaggtcctggtttagttccattgatgtggcaagtgagacctgaagtgcaggctaaccaggtattgttaggtgcctggtaggagactgaggtgcttaaggaggtaagcatagactgattacaggtagcctgaaagggagaagcagataagttatatccggtgctaattagacaagaagtgtttccagacgtatctcctaatgggagggcatgggggcatgtacaacaagaaagagagccaattttaagtgcggcttctactcctaatccaatataatatgggggtttgtcctttaggcacaaccaacaatcttgggctagtttaggctgggtgagattgaggaggtgatgtaccccacctagaatggacatcaggctgggttggaggtgctgtcattgcaggtgaggtttggggaccaggaatggcagtgggacagttaaatcaaccttgtctggatgttttgggaacataaggtcatctaaatcagttaaaggcctgattggcttaggagggctccatgagacgaggattttttttggatggtgaacatagttccaacatcaaatcccgggatataaagccttaatccctatgacatgacataataccattgagctaaattaggattatggatgtttatagtgagaggattgcaatttctcctagtacacagcttaggacgggaagcacgagctatggaaagggttgaagatcgagttgatgccccagagtaggtggccaaagttacacatgtccagtcagggcagaaaaactggtaagaatcttgacaactagagttagggtgatttccaggacagaggtaaaagtcaacattctgaagtcctttttctgcacctttggagtttccacatccagtctggcttctggagtgtccaaattccacagcaaagtcgacgatacctgctcctatgactggcagattgcattgttcttcatgggtatgggcaggctctgggaacaaagtacataaatcaactgtaaaagagacttccttgagattcctgccttccaagtagtgtttgcaaacacacatcctgctgtgaaagaagtgaggaggaaagagtaggatggggcagaaggcataataggtggaaacaaacaatagaggtaaataaaaagaattaatctgatggcttcacttgacttaggggcagttttaaggggcctggcccaggcttggggacccatgtttcttgttgggctctgttgtcctttttgatgtgagattgatgaatccaagctggaatgccatctactttcagagccgttggtgtggtgaggatgacagtatgaggtccttttcaggcaggaatgagtcctttctggaactttttaatgtacatgaggtcacccggctggaaagagtggtagggccccgtctagtcaggaactggattggggtgagctccccggacaagcggctggatgatgtcttgtacctgttggagagacttcctgatttttactggcctgaagatccgaagcctgtttttcctcctctggggaatattttgggtgatctggcaagtcaggttgcagaaaggacactgcaggcagcagggtcagaggtgcaacagggagacgagctgcctcctaggctgtagagtctgctttttggttaccatgggcaatggccatgtcttctttttgatgtcctttgcagtgaattacagccacctgctggcagtgcttgggcctacagtatatccatctctgtagtgatggcagcaccagccttttgaactccctgctcaaggaagctgctaccatctctaaacacggtggcttctgcctcctttaaagatacctcttggagatcaggtcggccagattccgtagtctccaacggttcttggcagtcatggacaggtatagtaaggtctgtctcttggtggtgggagtggggattcacaggatggcttcacactggtgagtgccctttttcctttctttatcttgtaccttaggtaggacactctaagaagacaaagctgggcctttttggccgagatccaatacctgagcacctgaaggaggtaaagtaggtccctagtatgttgcaggcagctgtcagtagtttcagtagccaataagtcatctacatactgaagaatagtacaattggggtgactggctcagaatggtataagatcctgttggagggcttccccaaaaaggatgggggaatttttaaagccttgaggtaactgagtccaagttaattgggtggtatctcctgagccaggatctgtccattcaaaagcaaagataggttggcttttgggggccagaggaatagcaaagaaggcatcctttaagtcaaggacagtgtatactgtatgttctggtgggagcaggctgagtaaagtataagcattgtggacagttggatggatggtaactgtccacttgttaacctccctcaagtcctgcacaggctggtaatcatttgttccaggtttctggaccggcaaaaatggagtattccaggtggattgacatggtgtgagtatgccagcttgtagcagtcactgaatatggagatttatcccctctctagcctgctgactcataggatactgttttatctggactggcagggcagtggccagaagttctacaactactggcagatgatgctttgcttatcccagggggtttgactcagcccagactcgaggaaacagtctgtaggtctaataggaggagagaatttgttttattctccaatggttgtgatggtgaaaccaaaagatattcctctgacagaggggtagttagcaggagttgggcagtagggggcgttgtgtcccctaacgtgaagtgagcctgctgggctgagagatagaagcctgtaacttatggagcaggtctcatctgagaaggggaagggggcactctgggactacaagaaatgagtgagttactcttttctttcctaaactcacttatcatgagtgggtgacaggatattcctgaatagctcctgttgccccttgtacagctactcttttattagagacactgcctaagggtgtctgcagtactgagtgttccacctcagtatctattaggaagtatacatgctggccccccactgtagcggtcaccatgggctcctgggggccaagtgaaagggagccccagtcccatcagtcatcagactcctccgctgtggggagggtgaggacctttttcttttctggtttttgctctggctttaatgggcattccttcttccagtgtcctatctgcttgcaataagcacattggtttttctccaggggagcccgctcacctttcttgcccttttggctgggacccggggttccctggctattcctctgtgatgggggcccttactttttggcttcctggatggccaccactaagatttttgcttgtcttttggatgctttatcagcagctttttcagctgcctcagctgcctgttttcgtttttcagactctcgattgtcaaaaactttctgggctacttctaaaagctggctattgttcattccagcaaatccctccggcttttgtaattttcttttactatcagtagctgcctgagccacaaacaccaaattaatagcacggctattcttgggagctgccgggtcaaaaggggtgtaagtttgataggcctcctggagactttctaaaagtgttccaggttcatcaggcccctggacaacttcagttgtctcagacagatttatgggtttttgagcggctcccttgaggcccacaaggagataccggtgaaaatcatctaaagccctcctcccacccgaggagttaggatcccaattaggccgggtagagggaaaaacctccttaacgaggttttgggcttccccctctggtctatcagctgatgtaaggaaatactttctggcttctcttcggatacaattcctctcttcagagatgaagagggttaaaaggcgttgctgacaatcatcccaggtgggccggtgagtctggagcatggactccatcagtgaggtcagaacctggggtttttcaaagaaggggggattatgagccttccagttgtacaggtcagaagtagagaaagggacgtaaactaagaatggagctgagcgctcatcacccggagggatttgtgcctctctcagtgggaggaggggggctacctcctcctgccatggccacaatcaggaggcaatagatggggacgccacaggagatgtagttgaggaggcaaggggagattctgggggagcaggagggttataaggtggcagaactgtgtgaggaaaactttcctcttcttcagagggaggcaatacaggaggagccaagggagctgaggatccggacaaaagtgtgtggtctcgcttaaaatgaccttggaggtaagattatgaatggcacatgagcggagccaagggggagggctccggaccaatctcagccattgatcaatgtagggaaacggatcggggtgaccgggagttccagcaacgacccgccacacagcctgaagagctgtgagattcagtgacccttctgggggccacacggttccaaactgtggtcattctacttcacagagtatctggagtttgccttttttaaggtggaccccataattctctgagaagcctagggagaaattttgtaacatacattggagagggctccaatctttatgaggctgggaagaagagtttcccattctggaggcaatttaaaaaggtttcagcagaaatattaaacccagcacagacagagaaattcaagacctggggggctgcagtatcagaagaacagaagtattataaccagaagaagaaggaaaacaaccatagtcaacacttcttgccacataaggacggtctgtttaagctttgagatctagggggaggacaagaggcaggtctgaggccagtgggacctacgtgatcccctcctttttgtcctatagcctaaatatctttggtgtctccatgacttgaaggcaaaaagttcaaacttggccttttcttttaagggttgaaaaagggaggacagaaccaagtcttggagacactggatttgctgcaacacaggaaaatgagatgtgcagggtaaaggatgggaatgaggaggaaaaggggccacttggatttttccaggctaggaggagccatgccgggcagctctgggtcaccagggccactctgcggtcccccgccctgcctccaggccctgtcagacgctgcaagcccagctcagaagcctggcctgggaccaagttcactgcagcaggctgggcccttgcattctgagctgggtgcggatgcgctggtgctctgggaagtcaggggctttgacaactgaaggcaaaggagccgggcacctgagggggtcccgggggagggggtgccgggggaggggatccggcgtcgtcaccctccagtccttgcccacaggtcagggagcccctgccatgggggaaggaggctgtttcttttgtaaactggtggaggcgtgcctcgcccctgggcctgacagcccaaagagacacgcctgagacctctggacagagtacagcagtatgggcgtaggtttctctgcacagtgccttatccatgggcacgggaaaagttatgggatgacagaaaagatgagcaaggaggtctgtggggtggctattttgaatccaccaccggtctaatgtggaggtggtccagtcaattgggcatggggtatggcaatctaaatgccagcaacctttaaggtgccagaaatcccacactctttcccataacaacacctgatttgtttctgacagaaaaggcaggactgggatggccaacccaaatgattgatgagaaatttgacctcctgtgatagaaaatcagtactgaggaccttgaagaagttcttacccagttgtctagggcagtattgatgacctgacatatgaaattttaccaaacaagacaatagaccctggggcatacaaacaattatgacaattttttaatagacagacaaaggaaggggggcccgtgatgggatcagtcagatgcccatctggccactctccctgaggggacttaggctcctcttagcattggcaggctggtataaacccctggcttggatcgagctatgcctgatgctgccttaagccttaagaggtcaccacggaactgcaggtgagggcccattcaaactccgtagctttcaccgtggagctacatactggaaattcaagtgcaagcccttgaactccacattcacgcactcattcacacagagtttataacagttttcttattccctttccaaaacagaggtctccgggagacctgaacgagagaaggagaagagatagagaaagagggagggagggagagagagagagagaaagagagagagagatagagactagtcttaacagagaggcctaacagaaaaccaggactctgtcctccagtgtcctggaacatgggcagagtcaagggagggccatcgtcagggctgcttccctcccagagagacacagaggtgcctaacagaaaaccaggactctgtcctccagcgtcctggaatgtgggcagagtcaaaaagggagggccttgtcagagccgtttccctcccagagaaacagagtcagatctgacttactttcccaggaccagaaactgaggactcaggagttgaatttttgtgggcacacaccagtggtcgatccattcccgtctggaagatagggtcttatggggccctggaacgtcttctggtggtgcctcccctataagtctgctgtctgtccaggggagcctggaatgagtctggctctcacccggtgacaaaaaaatcttgctggggcctccaaatgttgtaactgagctaggtacagagaaatgccacactctgagacgaattcaggagtcctttattagctggtgaccgagagacggctagtgctcaaaattctctcagccccgaagaaggggccagattttcttttatactttggtttagaaaggggagggaggcagtctagtgaaaacaaccttacagaagtaaagcaggcaaaaaagttaaaagaataaatggttataggaaagcaaacagtttcaggtgcagggctttaaatctttcacaaggtgatagacgcggggctttgggtgttatcaaccagatgaattcctaggaactgtggatatagcttgccacagtattttatcagctaattgcatccttggacgtgctgggagtcagcttgcataagttaagtccttgaggaaggggtgggtaaggggctgtaagtgtaggagccaagatggggtctgtctggctctctcagctaagggagagtcaattcaggttaaaacaaggttagctatcacacacatactttgtatcttcttccttgagatcccagtccttcattgcctcttgtccaatgcttgaaaattgtgttactgttttcatatattgcatctggttttcttcttgttgaaagcaagaaaaaattctggtcatttcattagatcatggtctgaggcagaaatcaggctcattcttaatttattaaatggcttataatcaattctattaatatttacttatattctcaagttctccaggaaggataccccaaaaattcatattcacacacgacatgcttcatttcttgattgagccaacaagatctgttcaatcaatcttggctttggaagagctcagagcaaaagttccaagcaaggtcttttatgtttctctggctaaatgaccagaaccagttgtctagacactcatgccaggtaaaggtgtcttagtctgttcaggctgttgtaacaaaaaccataaactgagttgcttatgaacaacagagttttattcctcgtagttctgaaggctgggaagtctaagatccagatgccagaacattcagagtctggtgagggctgctttctggttcctagagggtgtcttctagctgtgtcctcatgtggctgaagggtcaagacagctgtctggggcctcttttataagggcactcatcgcattcatgggacttccaacttggtgacttaatcatctctcaaaggccccacacctttcaaaaccatcatattgatgattagatttcaacacaggaattttggggggatacaaacatttagaccacagcaaaagccattggtagacacaatggcccttggggccatgagggattttagattaaaattttttttttattatacttttaagttctgggatacatgtgcagaacgtgcaggtttgttacatagctatacatgtgccatgggggtttgctgcactcatcaacccaccatctacacattaggtatttctcttatgctatccctcccatagccccccaccccccaacaggccccagtgtgtgatgttccccttcctgtgtccatgtgttctcattgttcaacttcaactcccacttatgagtgagaacatgcggtgtttggttttctgttcttgtgttagtttgctgagaatgatggtttccagcttcatccacgtcccaacaaaggataggaactcatccttttttatggctgcatagtattccatgctgtattatgtgccacattttctttgtccagtctatcattgatgggcatttgggttggttccaagtctttgctattgtgaacagtgccacaataaacatacgtgtgcatgtgtctttatagtagcatgatatataatccattgggtatatacccagtaatgggattgctgggtcaaatggtatttctggttctagatccttgaggaattgccacactgtcttccacaatggttgaactaatttacactcccaccaacagtgtaaaagtgttcctatttctccacatcctctccagcatctattgtttcctgactttttaatgatcatcattctaattggcatgaagcagtatctcattgtggttttgatttgcatttctctaatgaccagtgatgatgagctttttttcatatgtttgttggctgcataaatatcttcttttgagaagtgtctgttcatatccttcacccactttgatggggtttttgtttttttcttgtaaatttgtttaagttctttgtagattctggatattagccctttgtcagatggatagattgcaaaaatttcctaccattctgtaggttgcctgttcactctgatgatagtttattttgctgtgcaggagctctttagtttaattagaacccatttgtctattttggcttttgttgccattgatatgggtgttttagtcatgaagtctttgcacatgcctatgtcttgaatggtattgcctagggtttcttctagggttttcatggttttaggtcttacatttaagtcttgaatccatcttgagttaatttttgtataaggtataaggaaggggtccagtttcagttttctgcatatggctagtcagttttctcaacaccatttattaaatagggaatcctttctctgctgcttgtttttgtcaggtttgtcaaagatcagatggttgtagatgtgtggcattatttctgaggtctctattctgtttcattggtctacatatctgttttggtaccagcaccatgctgttttggttactgtagacttgtagtatagtttgaagtcaggtagcatgatgcctccagctttgttctttttgcttaggattgtcttggctatgcggggtctgttttggttccatatgaaatttaaagtagttttttctaattctgtgatgaaattcaatggtagcttgatggggatagcattgaatctataaataactttgggcagtatggccattttcatgatattgatgcttcctatccatgagcatggaatgtttttccatttgtttgtatccagtcttatttccttgagcagtggtttgtagttctcctcgaaggggtccttcacatcccttgtaagttgtattcctaggtatttgaatctctttgtagcaattgtgaatgggagttcactcgtgatttggctgtctattattggtatataaaatgcttgtgatttttgcacattgattttgtatcctgagactttgctgaagttgcttatcagcttaaggagatttggggctaagatgatgggttttctaaacatacaatcacgtcatctgcaaatagagacaatttgacttcctctttccctaattgaataccatttatttctttctcttgcctgattgccctggccagaacttccaatactatgttgaataggagtggtgagagagggcattcttgtctggtgccagttttcaaaggaaatgcttccagtttttgcccattcagtatgatattggctgtgggtttgtcataaatagctcttgttattttgagatactttccatcaatacctagtttattgagagtttttagcatgaagaggtgttgaattttgtcaaaggccttttctgcatctattgagataatcatgtggtttttgtcattgattctgtttatgtgatggattccatttattgatttatgtatgttgaatcagccttgcatcccagggatgaagctgacttgatcatggtggataagctttttgatgtgctgctggattcggtttgccagtattttatggaggattttcactttgatgttcatcagggctatcggcctgaaattttctttttttgttttccgtctgccaggttttggtgtcaggatgatgctggtctcgtaaaatcagttagagaggattccctctttttctattgtttggaatggtttcagaaggaattgtaccagctcctctttgtacctctggtagaattgggctgtgaatccacctggtcctggacttttttctgttggtaggctattactgcctcaatttcagaacttgttattgatctattcagggattcaacttcttcctggttcagactcgggagggtgtatgtgtccaggaatttatccatttcttctagattttctagtttatttgcatagaggtgttcgtagtattctctgatggtagtttgtatttctgtgggatcagtggtgatatcccctttattattttttattgtgtctatttgattcttttctcttttcttctttattattctggctagtggtctatctattttgttgatcttttcaaaaaaaccagctgctggattcattgattttgtttgaagggttgttcatgtctctatctccttcagttctgctctgatcttagttatttcttgtcttctgctagcttttgaacttgtctgctcttgtttctctagttcttttaattgtgatgttagggtgatgattttagatctttcctgctttctcttgtgggcatttagtgccataaatttcccactaaacactgctttaaatgtgtcccagagattctggtacattgtgtctttgttctcattggtttcaaataacttatttatttctgccttcatttcattatttacccagtagtcagtcattcaggagcaggttgttcagtttccatgtagtggtgcagttttgaatgagtttcttaatcctaagttctaatttgattgcactgtggtctgagagacggtttgttatgatttccattcctttgcatttgctgaggagtgttttacttccaattatgtggtcagttttagaataagtgcaatgtggtgctaagaagaatgtatattctgttgatttggggtggagagttctgtagatgtctattaggtctgcttgatccagagctgagttcaagtcctgtatattctttttaattttttgtcttgttgatttgtctaatattgacagtggggtgttaaagtgtcccactattattgtgtgggagtctaagtctctgtaggtctctaaaaacttgctttatgaatctgggtgctcctgtattgggtgcatatatatttaggatagttttctcttcttgttgaattgatccctttaccattatgtaatgcccttctttgtctcttttgatctttgttggcttaaagtctattttgtcagagactaggattgcagcacctgcgttattattattattattattattattattttgctttccattttcttggtaagtattcctccatccctttattttgagcctatatgtgtctttacatgtgagttgagtctcctgagtacagcacaccaatgggttttgactctttatccaatttgccagtctgtgtcttttaattggggcatttaacccatttacatttaaggttaatattgttatgtgggaatttgatcctgtcattatgatgctagctggttattttgcacattagttgatgcagtttcttcatagtaacaatggtctttacaatttggcatgtttttgcagttgctggtaccaattgttcctttccccatttagtgcttccttcaggagatcttgtaaggcaggtctggtggtgaaaaacctctccgcattttcttttctgttaaggattttatttctcctttgctatgaagcttagtttggctggctatgaaatcctgggttgaaaattcttttctttaagaatgttgaatattggcccccactctcttctggcttgtagggtttctgcagagagatccactgttagtctgatgggtttccctttgtgggtaacctgacttttctctctggctgcccctaacatttttttccttcatttcaaccttggtgaatctgatgattatgtgtcttggggttgctcttctcaaggagtatctttgtggtgttctatgtatttccttaatttgaatgttggcctgtcttgctaggttggggaagttctcctggataatatcctgaagagtgttttccaagttggttccattctcctcgtcactttcaggtacaccaaacaaacgtaggtttggtctttttacgtagtcccatatttcttggaggctttgttcattccttttcattcttttttctctaatcttgtcttcatgctttatttcattaagttgatcttcagtctctgatatcctttcttctgcttgatcaatttggctattgatacttgtgtatacttcatgaaatacttgtgctgtgtttttcagctccatcaggttatttatgttcttctctaaactggttattctagttagcaattcatctaagctttttttcaaggttcttatcttccttgcattgggttagaacatgctcctttagctcagaggagtttgttattacccactttctgaagcctacctctgtcaattcatcaaactaattctctgtccagttttgtttctttgctggtgaggagttgtgatcctttggaggagaagaggtgttctggtgtttggaattttcagcctttttgtgctggtttctccccatcttcgtggatttatctacctttggcctttgatgttgttaacattcagatggggttttggtgtggacttcctttttgttcatgttgatacaattcctttctgtttgttagttttccttctaatgggcacctctgctgcaggtctgctggagtttgctggaggtccacttcagaccctgtttacctgggtatcaccagcagaggctgcagaacagcacagattgctgcctgttcattcctcatgaagcgtcatcccagatgggtacccaccagatgccagctggagctctcctgtatgaggtgtctgttggccccttctgggagttgtctcccagtcagaaggcatgggggtcagggaccgacttgaggaggcagtctctcgcttagcagagttcgagtgctgtgctgggagatctgctactctcttcagatctggcaggcaggaatgtttaagtctgctgaagctgtgcccaaagctgccccttcgcccagatgctctgtcccagggagatgggagttttatctataagcccctgactggggctgctgcctttctttcagagatgccctgcccagagaggaggcatctagagaggcagtctggctacagcgggtttgcagagctgtggtgggctctgcccagtttgaacttcccagtggctttgtttatgttgtgaggggaaaactgcctactcaagcctcagtaatggtggacaccccttcctgcaccaagctttagtgtcccaggttgacttcagactgctgtgctggcagcgagaatttcaagccagtgaatcttagctcactgggctccatgcagatgggatccactgaactagaccacttggctccctggcttcagtcccctttccaggggagtgaacagttctgtcttgctggcattccaggtgccactggggtatgaaaagaaactcctgcagctagctcggtgtctgcccaaatggctgcccagttttgtgcttgaaacccagggccctggtggtgtaggcaccagagggaatctcctgatctgtgggttgtgatgactgtgggaaaagcatagtatctgggctggaatgcaccattcctcatagcacagtccctcatggattctcttggctaggggagagagttcctcaatcccttgtgcttccctgttgaggcaacaccccatcctgcttctgctcaccctccatgggctgcagccactgtctaaccagtcccaatgaaatgagccaggtacctcagttggaaatgcagaaatcacctgccttctgtgttgatctcactgggagctgcagaccggagctcttcctattccatcattttgccagccacccttcaggattttagattttaaagagctcttcatgaatctcactagtttattttaccaaacattaaagatggatacccaggaatctccagagataagactagagcggtgctgggccagtatcatattacacaacagcacagcatacaaaaagaattgtggggccaggtgcagtggctcatgcctgtaatcccagcactttgggaggctgaggcaggcagatcacctgaggtcaggagtttgagaccagcctggccaacatggagaaaccctgtctctactaaaaatacaaaaattagccaggggtggtggcgtgtgcctctaatcccagctacttgggaggctgagacatcagaattgcttggacccaggaggtggaggttgcagtgagccaagatcctaccattgcattccagcctgggcaagactccatccaaaccaaaaaagaattgtggatgctgctaaatttgtagattaaaattcctatctcaggaaagaaatgtgtcaaatcaatgacagattcaacctaaaaaacttcaaaaaggacaactgaaactcaaaataagaaggaaataataaagatcagcaagaaattaatgatatggaaagcaaaataacaatggagaaaaaccagtgaaatcaataactgattttttgaaaagatcaataaaagagatccacctttgtggatctagcatgaaataatgtgagaaaacacaaattatcaatgttaggtacaggtgaggtgacatcactagatactatagattttatttattcatttatttttacaccccacctggagtgcagtggcacgaccatggctcactgcatcctggaactcctgggctaaatcaatccactggcttcagcctccagagtagttgggcctacaggagtgggccaccacacccagtttttatagattctaaaagggtaataaggaataatatgaataatcttattccaataaatttcacagtggccagtttgaaaacaaacaaataaaattgaacttatttttgacaacattgttgcaggaagtcagggatcctgaacagagggactggctggagccacagcagaggaccataaattgtgaagatttcattttaatatggatataaatcagatcccaaataatacttttataatttcttatgcctgtctttactgcaatcttggaacataaattgtgaagatttcatggacatttatcagttcccaaataatactcttataatttcttatgcctgtctttactttaatctcttaatcctgttatctttgtaagctgagaatgtatgtcacctcaggaccactattgtacaaattgattgtaaaacatgtgtgtttgaacaatatgaaatcagtgcatcttgaaaaagaacagaataacagtgattttagggaacaagggaggacaaccataaggtatgagtgcctgcggggtctggcaaaaagagccatatttttcttcttgcagagagcctacaaacagacatgcaagtagggaagatatcactgaattcttttcctagcaaggaatattaataattaagaccctgggaaaagaattgcattcctggggggtggtctataaatggccgctctgggagtgtctgtcttatgcggttcagataaggactgaaatacgccctgtctcctgcagtatgctcaggctcactagggggggaaaaaccccaccctggtgaatttgaggttagacgggctctctgccctcgaaccctgttttctgttgtttaagatgtttattaaaacaatacgtgcacagctgaacatagaccttcatcagtaattctaattttgccctttgccttgtgatctttgctttgccctttgccttggatctttattgacctcagaagcatgtgatctttgtgacctactccctgttcatacaccccttcccctttcgaagtccttaataaaaacctgctggttttgtggctcaggtggtcatcacggtcctaccattatgtgatgtcactcctggaggcccagctgtaaaattcctctctttgtactctctctctttatttctcagaccggccaacacttagggaaaatagaaagaacctatgttgaaatattgggggcaggttcccctgatacaatataaatattaatggagaaaatctcatggaatctgtgaacaaaaatgtagaataaatgaaattatagtttccagggtagacaatgatttttataaaaattatacttctatgtacagtttgaaactgaaatttaaaagagtactttttttttgagaaggaatttcactcttgttgcctaagctggagtgcaatggcatgatctcggctcactgcaacctccacctcccagttcaagtgattctcctgcctcagcctcccgagtagctgggattacaggctcacgccaccatgcttgggtaattttttgtatttttagtagaaatggggtttatccatgttagccagcctggtctcgaactcctgaccttggtgatccgcccacctcagcttcccaaagtgctggctttttacgagagcatacgatatatacttgagacatatatataagatgtgcaactgaaatacatataagatgtacactataaactacaaaatattgtggaagaaaattaaagatctaaataaagggagagatataccacatttatggattagagcacaaaggcttccctttgtgggtaaactgacaatgttttaaacccattaatgttttaattcttttcaaattggtgtgtgtgtgtatatatatatatatatatttatttattcaatgcagccgggcacggtggctcatgcctgtaatcccagcactttgggaggcagaggcgggtgggtcacaaggtcaggagattgagaccatcctggctaacatggtgaaaccccgtctctattaaaaaatacaaaaaattagccgggtgtggtggtgggcgtcggtagttccagctactctggaggctgaggcaggagagtggcatgaacccaggaggtggagcttgcagtgagccgagatcatgccactgcactccagcctgggtgaaagagcgagactgtgtctcaaaaaaaaaaagaaaagaaaaaatatatatatatattcaatgcaatctcaatcaaaatcccatgatgcttatattagaaaataacaagtgaattctaaaatttatatggtaatgcataaagtaaggacttagaatagcaaaaaaattgaaaaagatgcataaagttaaagaattatattgcctgatttgtagacgtattatttaattatgttaagtagactttaaaatattagcaaaaatatagattaagaaagtccaggaatagaccaacacatctaagatcaaatgatattttagaaaggtgcaaaggcaattcagtgaagattgtgttttcaacaagtgttgttggaacaactggacatccatattaaaacaaaacccaagaaacaaaaccacaagctgtgaccccaaacctcacatggtatataatattcaagaactaactcaaaatggattataaacctgaaagtatgaaaccttcattaagtaacatgagagaattttttaaatcttggcaaatacttctgaaatatgcaccaaaaacatgttcaatctaaggaaaaatgacatgttcaactttgtcatcagtaaaaatttctgctctagaacagactctgttaagatgaaggagaaaatgaaccttaggctagaagactatactggcaaatcacatatctacagaaagacttgcatccaatatttactaaaaactctcaaaactcaataataaaacaaaaaagtttaaatgggcaaaagatttgaacagacagttaaccaaagaagatagagggatggcagtagtacaaataaaaattgtaaacattagtcattagggagatacaaagtaaaatcacagagaaataccactacacaccaagtgggaatggtgaaaattgaagactctctataccaagtgttggtgaagatatggagtacctgaaatcctcataacactgtggagggcatgtaatgtagtataaccactttgaaacacaatttgtcagtttgtaaaaaggtaaacatccacttaccctgtgacttggtgtgcttatgctttttattttctgcgttttatgatgacatcttttaaagtttactggctctggagagactgccctcccaggattagtcttttcttagagatggcaaagcgcttgacccagagcacctctctcatatacaaccaactgatcctgagtctacagccccaattacctctttatccaactctcacacccccatgccaatatctcccctgcactgaagcaccccacgaccaggtaccaggtaaccagagaccaacactataggccaaagcctgccggagttattcaaattagctaaccataagctgtttactctgccctgcctggcctgtcccatgaaaactccaataaaggctgttgcctatgccttccccttgctcctgcctcctgatcaacactggtgctctccatgtggccctgtgtggcatggtgtgcccctaggaaatgtaagtaataattgctttccattgcattggcctctctttgtggtcactcagtcaccaccttaagttaaaatcccacaggtagaaatgagacacatttcttcgtgtgtccgtgtgtgtgtgtgtgtgtgtgtatgtgtgtgtgtaagtgggggcagggcacgtctgcagagagacccacggccctgggccatgcctttgggtgacagtgtatcagaaactaagctcagcatgcagtgggatgggttgggtgttgctgtgacatcctctgtcctccctggagcaccgtgggattgggagcaggctgagcactgtggcgccagcccgcaggtccatgtgtgcatgtgcacccaggaggccctgaggcatgaccgtgtgtcttggcaaacatgtgtctgcacttggctcgccctagcacagaatctgccaccgagtgccggttcaacaaacatttgataagtgagtttgtttgtctgaatgggtagcagattaggtgcagctttcgagaaaattagtaaattgtagtttagattcaaggaacattacctggaataaaacgcagaacctaaaggatgtgaggtatagaaagtgcgttaggatcacatgttacacagtgaaaaggtcctacatatgtgggtgttgaagccacttgcctgtgacttctgtcacctgactggaccctgattgaccctgggtgaccaggggcaaaatcagcagaggggcgcagctgggggtgcttgctggcctggccactcaccgagctgtgagcagcaggggaagctccacccagggccctagtgagtatgggtgtggggggaggggcacgtgggtggccctgatcagtgtcagggtgagctccccccatcccaccttcctgttacctgtggagggtgtccagtttcttgccgttttgaagcaagaattggaaaaaaaaaaaaaaaccgcacaaacagagcaaggaaagaatgaagcaacaaaagcagagatttactgaaaatgaaagtatactccacgtgatgagagaaagaatgaagcaacaaaagcaaagatttattgaaaacaaaaatacacactacatggtcgggcacggtggctcacgcctgtaatcccagtacattgggaggttgaggagggcagatcacttgagatcaggagttagagaccagcctggccaacatggtgaaaccccatgtctactaaaagtacaaaaactagccgggcgtggtggcacacgcctgtaatcccagctacttgggagactgaggcacgagaatcgcttgaacccagtctgcactccagcctgggcgacagagtgaggactccgtctcaaaaacaaaacaaaacaaaacaaaacaaaacaaaacaaaacaaaacaaaacaaaacaaaacactccacatgatggaagcaggctgctgggagcaggcccgagtataggggcccccaggttacagaattttctggggtttgaataccctctagaggtttcccattggttacttggtgtccatcctatgtaaatgatgcagtggcccacaatcagtctgatcggttgcagaaagcaaacagaggctgaggtgaaattacaaaagttacaccctatgcaagcatctgattggttgtggcaagcaattggttgttttctgcaaccaatcagatactttcaattttccatctgccacacagaaaaaggggaagtaggcttgcaaagggagtagtctctggtccttttcttacttaggtttgaaaaattgttttctgtttgatttagttctaggaagtcagagtgaatcggccttaggttccgtgcctccagaccctgttctcctgcctcattcctaccaagctgctccctgcaggggcctgatgccctcagggaagattctatgtattcactgtctggggctgctcaagccactgctctgcgcagccctgcctcccactggccttctcaatggctttccgctcagggaacccctgcagcctgtagtctccaggcaggccttgggccaccaggctggagagagccgcggccacactcagcggtgcaaggtgacccggctgtcttcctggcaggtcctcgtgggagcggctgtcccttgttcaggggcccgggaccgcgtccccgtcccccgacatgtcccccaagcatgccttcagggcagggtgcagactggaaggctggactggcggggacacgcgtgttctgcatctcctaacgctgtgcccactgtgggtgggacggtgactggcttgggtggggtccaaggcgggggtgacgaatgacacccttggagagggggcctgcaaagggcactgtctgtggccacgtggttactgtgggatttggccttggggaatctgatggatgttgacagccagttcctgcctcttttcctcttctggagcccccttgctagcaccgcgaaaaaccccgcacagctccagccgcggggctcgctcaggagcggccgcgaggggacacccaggttgcgctgcaggaaagcccttgtctgagcagggcacggggctccacgacaaaaggacacgatttgacttaaattatgtttttcccttgatgatattttcattttctttaaaaggatgtagttttcttggaccgtggaccaagcttatttcttaaacagattccagcaaactcacaagtgtccttcagctctaggcctgctgtgtgtgtgtgtgtgtgtgtgtgtgtgtgtgtgtgtgtgtgtatgtgtgtgaatgtctggggccaaggccagggatgactgggctgtggtgagaacctgacccttcccagtcttccctgatttctcttgttcctgcagctacctagtttggggatggatggggaaggaggccccaggatgagtcctcacgtctctgcatcccactgggggctgcgtacaaatggatgaggaccccccccttgaaaggctcctgggtggtgtaggccctggatgggagagttggggggtagagctggatgtgggatctagatcagggatgcttggggcttttgatgccctgatatgggattgaggagggggcatggtcaatgctgaatgggtgtgaacagatgactggggatggggagcaagggagattctggtgggggaagcacgggaaggttgaggtcagagctggggaagctgaattccaggttgaggagaaggaggtgtggtcgcagattgcagggaacccagaggacttgagcagggaaccctctggccaggtgggtgtggcagttgacattggagttggggtgggggtggagtcgggggtggagctgcagatggcaggggcagtgttgaaggtggagggtgacggttgaggcagggaaggggcagtggggtggggataccccatcaggttgtcccatgcctctctgagagatgcctgcccttccacccgcccttctggggtcagtccctcccacttcccccttggctgaagaacacacacagaagctggatggatgcaggtgagtttattaggcagcattgtcccgcaggggacaggcctgggtggggaggtggggggcagccgttcccaggcttgccccaatcagcacagcaggagagagagtagaggcagcagcagggcgggagctagggagggtggggccctgggcccagattctcatggttgggacaggcagcctggacaggaacccgaggtgcctatggatggtgttacttcagtatcgtgtcggcacactggttgttgatttcttcctgtggggaggggtgggaggccgaagggaggggtcttctggggaaggagggataggatggggttgattgcggaggctgagcatcagagcgcggaggtccagcgccctgaggtcttgtccctgggcagctgcccgtgtgagaggtggttgcttggtgagaggtggggaggtatttgggtggagagagaggctctcagggaacagagtccctgctctcaaaggaggtcaagggctgtggggtggcgctggtggccgggccctgctgcactcaccagttgctgcacgacggcctctgtctcctcgggggtcattgtgtcggtcacgcagtccttgagtttagaggatgtgtttctttccggctccgtgaggtggtatctgttgacagtgtccatgtaggtgtccttgtccttggtcagaaactggttaatgaccgtcataagctgcgggcagagtttcctgggctctgcggggagagtaggagcgtgtgatcagggaggggtgggtgccccggggctgcagcgcggcccgggcttccctggcggggcctacctgcgagcagcggcagcagcaggagacccagcagcgccagggctcgggcggacgccacgcggttcggggtcggggccggtaggtatgcgggtcacactggggcagtgcggacgcaggtccctctggcatctcgggagacgcggtccttaaactccgtgtcctgggggcgggcccgggtggcgtggcttggctggacagggagggtaggggcggtagtggggtttgtggcactccagcgtagcaggttgcatctgcgggtccccgcccctgccccgcccccagcccctcccatggtgctggatccaggcagctgatgtgcaggcggggacccctggctgggcgcggtcctgggcgcgtccctgcgcggttcaggcttccatgcgcgctgagactccgctggctctgtggcctgccccgtcgtgtgtgcgtcacgaggcttgggtgcacgcgtttgagaatgggatatgtgtgtgtgagtggaatgcgctggtgggagcgtgtggggtgtgtgtgtgtggcacctgaggttggggtgttgactgtgtggggtgggggtctgtgattatatgaatatgagggtgtgattgcggctgggacagggcatgtggctgcctctgcctctgcatctgagagagacaagaagtgatgggagagtcttgtgtgggggccctgcggggcagggacaggggacccttcttcactttatgccatctggaggtgaaaagccagctaagtagcaggcttcatcctggagacagaggctgggagactgcagctgaaaggtgtgggttccgggagggctgcagggggctgagcagcagcgtcagggagcagagggccgccctccctccatcttccttccttctctggaccccagagcactgtgtccccctcccacccctacagctgcaggtggagccagctggaggggtctttagaaggaagggggtcctctgagggcagagagggccaggaggctccctgaggacctgaggcccctctgggcctcccagggctgggcctgtggtctgatctgctttgccctgggagagacgtgctcagtggtggggtttgtgtagctgtcactcagtcacctgcctgtgcccagccacacacctgtgactcccatgggccccacccaatacacatgtgggtcttcaagtgccgtgaggggaagttcctgcctgtgtcacatgcatccatcccacccaccacactgcaggttacaggactgccccacaagcgccaccatgccagcctgacgttacctggcacacaggtatcctcacctgcatgacatgatcagatcatgcactttctatgccagggccagtgccagggcaagcttgtatcttcagctttggggacactgtggggcgggtggtggctggaggccagggaagtcaccaggctggagagggttgatgtcagacatctcccgtgcaccactttgagccacctcagcctcacctgggactctggctggcactgggactagcagttccatgaaggtttagagcatctctaggcttaggaagggcctcccttgtcatcactgtggtccgggctgcatgccttgtgaccaagggctctggacagcagatgcagccagccagagtgtgggggtgaggggcctgggcacaggagggatgggaggccttccctgcacccccatggccaccatttcagagggaggacagcaattatttgggtttgtcctgtgagcggtggcagagagaaggccccagggcaggtctagggccagacaggcaccctctgctgcagcctcggggccaccaggcacgtgatggggccggtgtggggatgtcccctggccaaacacatgggtagggggtgctctggggtcagtgggtgggtccgggcgtttgcaagagccatgttaagatagacagtcctgaaggatggagggagggggcagaggggtcagagaatggatggatgggggagacggctcctgccgcttcctggcctctaagtgggggtgatgggtggtaggtgagtgcagtgggagctgcaaggctgagccagggaagtggaggcagcagagatgcagaccttgcctgaggctgactcgggactggggcttcttagaggccagggccctagagctcctggacagggagtttgcaggaacagtgatgcagcatacaacacagcacaactcgacacaacacaatctgccacagcagagcagcgtgcggtgcactgggctgcagcagagcatggcccagggtccagggagtcatgtaggctccagggaatcatggagcaaactgacctgagccgcatccctcagccaaggcacaggcccccagccttgagccacccacttccttgggacagctggatgccctagtgtccctggggctgaggatggggctggggctgctgtccaaggtgaggtctgactctaatcccctgtctctaatccccagtcgtttggggaacttgggcgtcttccaggggacccagtggtgctgatgggatttctgggcacctcagccaggtcccctgcccacctcgccacactggttcccactgcaatctggctttggggcctgtgtggcctctgcttactgagccctgtggttccctgccaggcaccgttggccctccggccaggctggcacctggagaatggcctgtccccaaatcctgcactcttcccagctcacctgctttgcttttctcccgcactgggaggtgggagccaggttgacactggaggaggagctccctcaactgtggcttcaccttagggttctgggcagggttttgggcagtgagactttctggataggggctggaggtcaacagccttctgagtggggagtggtctcatagcagagagacccacggtggaggggtggggtgggcagggaggacgacccggctgtggaggagctggggcaggcaggttacacggatgcagttcacactccctccttctccccatcctctcccacaccccccgcgtcctctcctgtctcttcctccctgccctgttctgtccctctttcccctctgtgtctccatcttcctgtccctttttccttattcatttgtcctcctcttcactttccatttctccctttccctcctcccctcacctctcatctttctattatgacatatgacacaaatacagactaggacacaccatataaacgtatcttaggtgatgactgtgacgcaaacctcacaatacccctgcagttcaagaaaggtcatggtgagcccctcccggcaccagcctcactgcctagagttgacccctgtcctgagtttgtggtttcttgttgttttagtggacggttttgctacctaaacatcttcacatataataagtgttaattttactcttttacagtttttataaccgtggtcaccatgtgtgtgttctcccatatcttacttttttgttcaagatttttgttggtatcaatccacattgctctctttatggtttaaaagcatcgaccattgtgtactgattctattatcgtgaacagcactacagggagcttttatgtgtggatgtcctggcacacatttacattcacatttgtatgggtttgtgcccatgtgtggaattttagatgataaggcattcatattcttgactgtcttaggtaacaggaaaccttgaaagcagttatacaatgcacacgctcagccacactgtagtatttcctgccactctagatcgccataggctggtatcgtcagtgtcgagtgaaccatctggtaggcaggtgtcaggggcatctcattgggttcccatttgcattttctggtgtaaggaggttgaggcctctttatgtgtttattggtcatttagtgaagtgtgagtagagggcttttttcccgtttatatattgcatgttcatttcttttttccatctctggtcatttgtaggagttttttgtatatatatatatattttttttttggagacagggtttctctctgctgcccaggctggagagcactggcatgatctcagttcactgcagcctcaacctcctgagctcaagtgatctttctgcctcagcctcctgagtatctggtactacaggcgcatgccaccacacgtggcttatttttgcatttttagtagaaatggggtttcgccatgttgtccaggctggtctcgaactcctgagctcaggtgattcacccgcctcgacctcccaatgtgaggagttcttgctatcttctttttttgtttttgagatggaatttcactcttgttgcccaggccggagtggaatggcgtgatctcggctcactgcaacttctgcctcctgggttcaagctattctcctgcctcagcttcccgagtcgctgggattacaagcacccaccaccaggcccagctaaattttgtatttttagtagaggtagggtttcaccatgttggccagggtggtgttgaactcctaacctcaggtgatccacgcgcctcagccttccaaagtgctgggattacaggcgtgagccaccactcccggccagtattttcttgataagagcccttgtttggttatttatttaaaatgccttctgcaacactggggattattagctttgtattcccttgacggtttttattgaacagaagtataaggcttactgtaatgaaatttatcaacgcttcctttctgcttgatgttgtgtgtgtgtgttttgcttaataaatagtcttatctttttatttttatttcttaatgtggttttattgctttggaaaaaagattctcatctcatggtcataaagatattcttctacataaatacttgtgaagtctttattcttttgccttgtccattgaggtctctaaggtacatggaattgacttttgtgtgaaatgtgggtaacagtcctcttacttttaaattatatagattccctgctgtcccagtactgtttaggacaggagtgtgtaatgttttggcttccctgggccacactggaagaaggattgttttgggtcacacataaaatacactaacactaacaatacctaatgaactaaaaaaacttaaaatcgcaaaaatctcataatgttttaagaaagtttacaaatttgtgttgggccgcattgaaagccaccctgggccgcaagcatcctgcgggctgcagattggacaaatttggttttggagaagatggcccttattccattattctcaatgtccctttgtcaaaaagcaagtgccccatagagggacatagtttgcttctgagttctctatttcatgtcgctggtctgtttgtctgtatgccaatgtggcactatgttgagtacacactaaagctttagttcttgactctggcagagggggtccttccgctttggccttgttcctggagtgtctttgctgtttttgaccctctgcggtgccagacgtttagaaacagctatttgaattcaatgtgggagagaactgaagttttgatgacatcgagtattcctctccataatgctgggatatgttgccgtttattttgattctccctattttctctcaataattttttacatatatatttctatggtgctcttatacatgtattaattgattgattccaaggcatctgttctttttaatgccattgtaaatgttacattcttttaaagtgtaggtttataaatgtttgtgttgctatatagaaaattttaattattctatattattttgtatttaggattcgaagactctttagtattttctctgtagattctttaagattatttatataaatatatcaacgtgtatttgtttcttcctcttcaatattcatatattttacttgtcttgctttattgcatttgtagaatctctagtgcaatgttggatagcaatggtgaaaacaggctttttgtttagtatctaaactcaagaggaacttttttgtttgttttgctcttgacagcattgtattttatataaattgttaaatttcacgtaattttaggcttataagaaagttacacaacattatatataaatatttctggatacccttcatccagattcaagaggatagcttttgatattttatcattaaataggaagtttaacgtaagatatttttggtagatgttctttgctagattaaagatatatcattctatttctattttttaaggggatttttaaatcttttttgagacagggtcttgctttgtcacctgggttggagtgcagtggtgtggtcttggctcactgcagcctcaacttcctggactcctcccacctcagcctcccaagtagctgggactacaggtgggtgccaccacacctggctaatttttgtaatttttttagagacagagttttaccctgttgcccaatgtggtctcaaactactggctcaagtgatctgcccaccttggcctcctaacatgctgcaatgacaggtatgagccactgcatcctgcgtcagataattttttaaatcgagaaaagatgaatgttatagcacatctcacttgcatttaatgaactgtgtgtacagtttttttccccttagttctgtgaaagtgttacatcaaataattttctaatttgaaagctaccttgcatttctggtgtaaatcctcctttatcagcatacactattcttaaatgtaatttattccactttgccaataccttgcatggtacattttgtctatgtccttgagtggttaaattttggtgtcaggatgataccagctcattatgaattggggatgtagtggtaatttctatttattccaacagatctagtcttcttctttccccagtctgctttgtaccccagaacatggccttttgtggactgcatcattgggctacattgccctttggtttttgtgggtcaacacattggagatatagcagggcactgaaggaaagaggagagtgagatgaggggactcactcccagttgccctccttcaggactacaggttggccatggctgcgttcctatcctggtggccgaaggtcctgggagctcgctctctcctacagttacaggtctcactggattgtagcaaagcttcttttccttgcctcccattagatattttgctcttgcttgccttgggcattttgttattggtttccctttactttgctcacagcagagccataagcctgtgaacccaggggtgtctgagacaggtctcaatcaatttgaaagtttattttgccaaggctagggatgtgtctatgacacagcttcaggaggtcctgaggacatgtgcccaaggtggtcaggatacagcttgcttccatacattttagggagacataatacatcaatcaatgcatgtaagatttacattgcttcgatctggaagagcagaacaacttgaagtggggatgggggggcttccaggtagtaggtagatttaaaaattttctgattggcagttggttcaaagagtgaaccaatagaaaagaatgtctgggttgtgataagggattgtggagaccaaggtttttatcatgcagatgaagcctccaggtagcaggcttcagagagaatagattgtaaatatttcttatcagacttaaggtctgtgttgatgttaaatcctggtcagcttttcctgaattccaaaagagagataggtataatgaggcatatctgacccctccttccattatgacctgaactagttttttaggttaactttgaatgcccttggtcaagagaagggttccattcagatagttgcgggccttagaattttattttttgtttatagtcattcattaaactcttgtcatgtatcctgtgtgagtgtgccatttccttcctgcagggacattgagtggtacagggaatgcaccctcattatttatgctttggaagaatttgtataagattggagtggtgtaagcgcccgacgggttcttcccgcctgctccacaaacaaaatcaattcacagagaccataacattgcagtaaagaaagagtttaattgatgggaggctggccatgccatgtaggagacagagttatcatcaaaatgatctcattgaaggctcagaagctatgggattttcaaagatgcttggtgggcaggggacttggttatatggagtggtgagggcttgggttgaagacgaaagaatagggagtcaaagctgtctttttgcatggagtcacttctggatggggccacaggagtggctaatggatccaggtggagccatcagtgttagacacacaaagaaaacctgaaaagacatctccaaaagccaatctcaggttctaccatagtgatggtatctgcagaagtaactggggaagttgcatatctgtgaaatccagaataattggtggcaattatttcatatgtttattaaagttgttattttgttttaatagctttattgaagtatagttgacatataacaattacatatacctaaagtgtatagtttataatttttgtttatgtctataccttggccaaattaagagggaccatcaggcactatcctcctagcttgatggtctctcattagctttataaacacagttgagttttggggaagggctattatcattttaattataaagtaaatgtctctttttaatgttcttctcttcattaatctattaagttgattctaattgtactttaaaatcttgtatgtttattaaattaaattattttgttttaatatcttttaataaagtataattgacatataacaaatatgtatatctgaagtacataatttgtgacttttgacagttgcaaaaatcagaaccaccataatgatcaaaataatgaacacatccctcacttccaaatgcctccttgttcctctgtgtaacaccctctcctgcatctccttaatcccttcctcctctctaggcaaccgctgatcagctttatgtcagtatagattaatttgcttcatgtaaattcaatcatacagtatggaatgttattatttcttcagagagtgttgtccttctggttcatctgtgtcatgtgtatgaatagtttataccttttttgaatgttaaatttaaaaaactacatacggtgatactcactatttttgatgtacgtttatttccatgagttttgacagctgtgccttctgcaggttttgtattgatgtctggaatctcaagcactaccaccacaatagagatgccattttcttactttcaaatattccttgtgctgtgcttttgtagtgaaatattctccttgtcctcaattctgagcagccactggttcattctttattctgataccattgcgttttctagaactgcttatcatgaagtcacgcaatatgtagctttgttgttgttgttgttgttgttctttgagacggagtttcactcttgttgcccagcctggagtgcaatgacgtgctctcggctcaccgcaatctctgcctcccaggttcaagcgattctcctgtctcagcctcccgagtagctgggattacaggcatgtgctaccatgtctggctaattttttgtatttttagtcgagatggggttctccatgttggtcaggctggtctggaactcgtgacctcagatgatccacctgcctcggcctcccaaagtgttgggattacaggtgtgagccaccacacccggcaatatgtagtttttttgagtctcgcatcttttaataatttgatcatttacaaattctaattatgatcttacatttttaaaggtatcaagtgtcattacactttcttgatttctttcttttctagtttattgttgatgttcaggaatggtactgattttagtatgttgattttatatcctgcacctttaatgaatttattgatcagttctgagagttttttggtggtgcttttggggttttctgttcataagatcatgtcctctgcaagcagagacaatttgacatcctcctttccagtctggatgccctttgtttctttttcttgcctaattgctctggctaggactttcattactacattgaataaaagtggcaaaaatggacattcttgccttgttccagatcttggaggaacagctttgtacttttccctattcactatgatgtgaataggctgtgggcttgccatacatcgatttattgtgttgggctacattccttctatactcagtttgttaagagtttttaccatgaaggactgttgaattttatcgtgctttttctgcacctatcgagatgttcatatggttcttgtactcattctgttgatgtgatgtgtcttatttgtggatctgtgtgtcaggaaccatccttgcatccctgggttgaattccacttggcataggaatgatcactttgatgtgctgcttcatttgtttggccagtattttggggaggatgtttgcatccacgtttatcagtgatattggcctatagttttctttgttgttgtgtccttccctgagtttgatatccggataatggtggccttgtaaactgaatttggaagaattctatactcttcaattttctggaagagtttgagaagaattgctattaattcctcctaaatatttggcggaattctgcagtgaagccattggagtctggaattttctttgataggagacattttattacagattcaatttgtcacttgtaattggtctgttcaaaagtttgatttcttttcagttcaatcttggaaggttgtatttttccaggaatttatacatttctgctaggttttcaaattggtggttgtattgttgttcatgacagcctctaatgagagaaaatctaatcatgaaaattcacccctagctgaggcccacttccttcctcagtgatgtggccgtcacccaggccacaggtccgcataccagtgtgagtcaggccgggccaggtgggcgggaggcttggccgagtggcaccaggaaatgcttcttattgctattgactcggcttgaagatccctaacctgcataggtttttggaattaaaacagaaaggtaaatgtcaggcctggtgagtttccagacctctggcatgctcagccccagggcttgccaccccacaggggtcggatgctccatctcccgctccagtccctctctcactagactttctgctgatgtcctgtgcactcaaccaacatgacccagtgtctagtgaagtcacgcagagcccatgcaggagacacacagggcattggtgacttggtcacactcctcagggcacatatggggtgaccgatggatggaggagaaggaaatgggggtgctaagagttcactcttgacttggagaaggagacctggagaaggtcaagtgttggaaccaccctggcagaggtcagagacaaaaagaaacctgagagatggggcccagcaaagtggaaagctggggtgtacagagggagggtggaggatcaggtctcaaggtcagcaggctgggtcctgcctattgtgtgttctggcactgggtatggactctgtgctgagagatatgggtaggtgtctggggtgtgtggtgacgtgatgagacctggactgtaagaggtcacctctgcattctgggcaatgacttaggggttggagggaggctatgggaaggtcaacacttagacgtactgcccacctaagactggagtgaccttgtgaggtggctctgaagggtgtgggaggctgacttcaggcaggagaggtaaatgggactgagctaaagggaggtgtggggagcactggtcagggcagagaggatggctcaacggcctgtcttctaccagggagtggctcagagccagggcaggaggccagctctgagttggtgggagcctggcagaggttttgctcaggagtcctgggaggcccctggacctgagtgacaggtctgaggggtctcacttgcacttaaggcattaaaatgtccctgtgccttttgtatcctattagtaggtcaaggaacccagcagcaaggtggacttaggcctccaggggctctggctgtcatgggtgaggggagatgaacagagttggaggctgcagggaggagtggagggggagctggcaggatgggccagggttccccacacaggctcagtggagaagggcttgtcatcatggtgaccctttgtgctgcagcctagggggtgagacctacagtcatggaccagatcccagggcagtgtggatgatggaggaggagggtgagttcaaggcaggtgtggggacagaagatgtgggcctccaatgacctgcacagggcctgcattttatcctgaggaaggaggatcaggagcccccgagggcttttcctggagccgcaggtgctgccatggagtgcagggaaggtcactctggcagctgtggggatggcctggagcccagggagttggtcctagaggaaggaggcagctgccataatccaggtcagagtcaacaaggacataaaaccacctgctcattgtttactcatttcttcatcacaagttctctgagtatgtccttggatccaaggcctgggaaaccaggaatgtgggtatgaccccatttcaaccttgagaatggctttgaagcctattgtccctagaccacacctgaggatgttacctggcccacttttctcacattacacaggagaggactgaagacagaaggggtatggtttccacctccaaggtcctgcacagcccaaggacacagggcctggaggaggtcccaggtgtcctcatgtcgtgacctgacctctctcaaatggaacatggatctcagctatgattctattttccatccatccatgcactcatcatccatccatccatccatccatccgttcatccatccatccattcatccattcatccatccatccatcatctatccatagatgcatctatccacctatccatccaacaatccatctgtccagctatccatctatccttccattcttttatctgtttcagagacagcacttcctacatttgggcagcaagactcttgttgaagaggatgtggatgaggcatttctgtgggtgccggagaagctccatatagtgctaggttaatattactaagttatggctgaaattcaatattctatgaaacatacaagtagggaatataattccttataccaacaatacagagatcatcacatatcattaagaataacagagtcgtaagcattttagttaaagtaaactcacaggacattgtcattttaagaaattactcaatttcaggacaactgacagatcatgggtagactcatcttcagtgacaattattttctaacattttccttattctttcaaacacatgtgaaatgcttttgcatctcaaagtatttatatcaataacatgtttgtccaaatttctcagggcatttctaattcttttcatttacttctggttgaaactctccatctttgattgctacaagctgagttttaattgagactgaataagtagcatgatctgcattattttctttagctccacagatttaaattccattgaaatgctgaaatttacatgtttttgtctccaggcccaactattccatgagctccaaactagagcgtctcacaccccctgtgtcccgtcctcctggatagctaatggatgtcttggatgtgggaaacttatccaggccagcatgggactctggatctttgccctaaacctgctcctccccaggcttcaccttctcagcagtggcatcacatccagccagctgctccagcccaaatgtgatgagatcattttgattccccttctctccacatcctctccccatattcaattcaacagcaggtgctgtcagtgctgccccagcctctgtctccctcgtgtctctccagggctgcactgtgacaaggccacggtgtctacctggacggccacagggactcccagttggtcttcctgcctctactgccgcccccgttgctctattccaacagggaaagtgtgacctcgtaagtcctgctcatcccctcccaggatttttcactgcacatggaaaggatccacctttctgcaaggtcctgcgtgacctggcacttgcctcgttttctgacgtgacctccttccctgctgccccttgttccagctgcactggccatttctccaacacaacaaatcctttctcatcatgccgcattccctgccccagaccttcacctggtggctgcctcaggttcttcaggactcaggggagatgttgtctcctcagatgccttctgggaccacctgaccaatgtggcacctcaagccagtcccgcctgatcacatttccctgttgggtggtccttgtggttctcatcactattacaattttcttgagctttgcaaccccctcttcaccttggatgtgaacttcagggaagcagggccgtcacctgccttgttttccactgggtgcccggctctgggaaagggcctgatgtgtggcaggggacacttcttccctggctgagtggatgggtgatgactgggatggaaagtgcattaaatgaggccaattctggggacagaggggagatgatgtgtcctgagatgggggactgaaacgtgtgacctggaggagatgacggctgagggatgacaaggagaatgggtggaagggagaaagggcattttgggcagtgggagtgagggaggagaagaatgttgaaaggaaatctgggagtgcaaagatagggtggtcagcagtggagccttgtcctggccagccgtgtgtgccctgctgaaggtgggtctgcacttgtagggaaatgagctctcaaagatccagggagaaagaagatccaggctggtattcccatggaaggggagtgaggctggaggcagggagactcagagggatggaggtctcgctgacctgagcaggagggagggacagggtttggagggtgtcatctgagagacacctgggtgggagggagagggaggagtctagggcggtgtgagctgataggggtaggcgaccaccgcctgggaggtccaaggagcctgcggaaagggcttgaggtttggggagggacctcccccagaaggagttgatggagcctcatcagtgtattgaaggccactgagacctccatcgaggatgaaatcaactgaggggtgaggtgggagagaggggccgtgtttgagggtggcactcgttccctgtgacctcaatgtcaatgtcccctgtcatggtgacatggccacacagacccatggcctcatgcagattgcctggtcccaccagccccaggagcagagctgagctgcaggtatttatggggacgctgaggcttgtgacttagccaggagggtgtgatttcccagcctccagcatcccgagtcctggggagccctggaggttctgcattgaggggttgtggggtagaggtagggggagaaaaaaggacagcttgggtaggtagggatggagaagtgtgttaaggttgatttcctgggttccgaaaacaggcatatcgactggacacagtggctcatgcctctaaccctagcacgttggaggttgaggtaggtggatcatttgcggtcaggagtttgagaccagcctggccaacatggcaaaaccctgtctccactaaaaatacaaaaattagccaagcgtggtggtgtgtggctgtattctgctactcaggaggcagaggcaggagaatcgcttgaacccagaaggtggaggctgcagtgagccaagatcgcgccaatgcactccagccaccctcctccccgccaaaaagaaaacaggcatgtctatgctacacctgtagagtttttcctcagtcgcatattttcacactgggaccctggtcacactctgcatatgcggtcacagccaaccccacacagatgccagaacacagaactgagctgcaggtgttcattggggtctctgtagtgatgaacagagccaggccaggaacgcggggagccccaaggaaggcaggagggccaatatctgatctgcaggggtcctcagatcagaaggctgcttctatgcaatcgttgctctgaaggatcttcttctgttggaaaaagaagaaagagaggagccggtggcctctgtgaaaggctccccagactcatcgttattgcccggtccccgagctcagaggagctccttgagtgtgtctgcttgttggggatcccaggctctggacaaagatggtggatgtgggttgtgtctcctgcttgagtgtgactctgcatgtgttggtgtaacacgtgtatgcatgtgtgtgggcaggcatggggtgtgtgtgttgctgttaacagcgtcctgtgtgagtgtgtgttgctgtgtactcatcatcagtgctttggtgcagtgattgtggttccctgcatgcctaggcctctcccgggcaccaggggcagaggttctccccttgcagagttgcagcgtctgggtcgaggacttggagaggtgaggcaggagggccctgttggggcaggtggggaacttcatctgattttgcgcatcctgggatgtggcttcctgcttaaaacgtggaaagcaggatggaaggcaagtgcagggaagtgcaagcctgggacgtgtggccatgtagtgtgtgcaggtccccccgggcacactcacaataacaactgaatgagcaaatctttctgtcacggagacattggcaaagcattgctggacattgaggaaggactcctctgtcaggggactggggttgtaacgagcaagctcctccttcaggaggtcttgggacacatcaaacacaacattcgcaagcagtttatcgatatccaggcaggcatcccctgtggaggatgaggtgagataagaaaacagaggaggtcagaattcagcgaaacctcccatggccaatgagaccttgggatggtgatgagagtgaaggagcagggccaccgcttcctcccagccctgctcgcctctttcttacccagctggacgctgcagatcagagccagcagaagagcacaggtggcggatgtcaccctcatgacagcggagtctggtcccagcaggcacaggcagggaatttggcgatgggtgagctttatgtatatctgaacaaggcacatgcctcttcgtgtgtgtgtgtgtgtgtgtgtgtgtgtgtgtgtgtgtgtgtgtgtgtgtgaatgtggtcagggcaggtctgcagagagaccctcggccctgggccatgctgttggggtggcagcgtatcgggaactggactcagcatgcagtgggaggggttgggtgttgtgacattctctctgtcctccctggagctccctgggattgggagcaggctgaacactggtgtaagcctgcaagtctgagtgtgcatgcacatgtgaccctgtgtcttggcaaacgtgtgtctgcacttggcacgccctagcacagaatctgccactgagtgctggctcaacaaacatttgctaagtgagtatgtctgtctgaatggatagcacattaggtgcagcttttgagaaatcagtaaactgtaatttagattcaaagaacattatctggagtaaaacacagaacctaaaggacatgagatgtagcaagtgtgttagggacacatgtgacacagtgaagggatcctacatgttggggaccagcctcaacactacccgtagggtacccgaagtctggtggtgacaaaggattgagaaaagacaagttaagagtgaaaggtggggagccagggggccagtgcaaaatgtggaggctgcaaaaggtgccgagctctggtctccacactatttattgagtacagtcccttcgatctaagaagcagatgttcagggagaaacagtgaaagggtggcagtgcatcacaggcataatctatagcaatagcagtttaaatgagtctcctttgtgctcaaacagcataactttaacttgttggagagtagctagtaggagcggccttgactgggagcctgcacgtctgtccacattccagtgtttcaaagaagtgtctttctccctgagcacagtgtttacagagaagacagcgggtcttgctctgagcatgggaacatgatggcaattaggaggctttcctcctcagaggccttttgtggctttccacaacttattcccgtatttttatggccagtttatacaggcaccccacaagcccttttcccagcacctacatatgagggagctgatgtcactcacgtgatttttgtctcctgacaggaccctaaattgtaagtgtgaccccaggggcagaatcagcaggtggggacagctgggggtggggaaggcagcagggatgctgacgcttgtacactcgggtgccagtgccgctccaatagcggtttgtgccctactgtgtcaagggagggtctggctaggagcacctgagggacacgcccggtgcagaggacactcactgggctgctgagagccatgtagaaccgcagagcagttcctagattaggctgtgccacccagactgagtgggctcacctcggccaggcatgagccatcactgtgcacgtacagaacctcatagtagcgcccaggacttgggcctcttaaaggacctacccagcattgggtaggacttagagtggccgtcaccagtggcagggccctgaacgcccccacattccagttgtaaagttgagtggatgagttgacagttggactggcagacgctgaagcaggggctgtggctgagcagggaggatggaggccactgccactccctggccggccacctgctgtgtcgtccctgccacctgtggtcctgcagcctgggctgcaacctgcgcagtgcaggcgtccatgcgtgctgagactctcagccggctctgtggcctgtcatgttgtgtgtgcgggacgaggcttgggtgcacgtgtgtgagaatgggattttgtgtgtgtgtgagtggaatgcgctggcaggattccacccactatgtggggtggagggtctgtgattatatgaatatgaggttgtgattgtggctgggaggggctgtgtggctgcctctgcctctgcatctgggtctgtgtctgagaaagaaagggagagatgggggaggcctggtgtggggacccagcagggcagggacaggggatgtttcctcactttacaccatttggggaccctccccagggggaaaagccaggtacagtggagaagcactgtctgagtgggcttcgtcctggggacagaggctgggagactgcagctgaaaggtgtgggctccaagagggccgcagtggggctgagcagcagagtcagggaatagaggacctgggagcagagggccgccctccctccatcttccttccctctctggaccccagagcactgtgtcccgtctcaacccccacagctgcaagtggagccagctggaggggtctctagagggaggggggtcctctgagggtagagagggccaggaggcttcctgaggacctgaggcccctctgggcctcccagggcttggagcatgtccctcccagtggctgatctgcattgccctgggagggacatgctcagtgatggggtttgtgcagctgtcactcaatcacctgcctgtgcccagccactcacctgtgactcccatcagccccaccacatgtgggtcctcaagtgccatgagaggaagttcctgcctgtgtcacatgcatccatcccacccaccacactgcaggttacaggactgccccacaagagccaccatgcccacctgaggttacctggcacacaggtatcctcacctgcatgacatgaccagatcgtgcactttctatgccagggccagggcaagcttgcacttttagccctggggacattgggggtggtggtggctggaggccagggaagtcaccaggctggagacatcatctacctccctagagggtttgatatcagacatctcccgtgcaccactttcagccatctcagcctcacctgggactctggctggcactgggaccagcagttccatgaaggtttagaccatctctaggcttaggaagtgcctcccttgtcatcactgtggtctgggctatgcgccttgtgaccaagggctctgggcagcagatgcagccagccagagggtgtgggtgaggggcctgggcacaggagggacgcgaggccttccctgcaccctcatggccaccgtttcagagggaagacaacaattatttggttttgccctgtgagcagcagcagagagcggggcccagggcaggtccagggccagacaggcatcccatgctgcagcctcgaggcctgcagggcacatgatggggccggtgtgggggcgtctcttgtgccaaacaactgggcaggaggtgccctggggctggtgggtgggtcagggcgttttcaagagccatgttaggatagagagtcctggagaatggagtgagggggcagagggggcagagaatggaggggtcggggagactgctcccactgctttctggcttctaagtgggggtgatgggtggtaggtgagtggcagaggggtcagcgggggctgcaagactgagccagggaagtggaggcagcaagaatgcaggccttgcctgaggctgactcggggctaggaattctcagaggtcagggccctagagctcccggacagggagtttgcaggaacagtgacgcagcacatgccacggcacaacttgacacaacacaacatggcacagcagagcagtgtgcggcacactgggctgcagcagagcgtggaatggggtctgtagggtctagggaattatggagcaaaccgacctgagccgtgtccctcagccaaggcacaggcactggccttgagccacccacttccttgtgacagcctcatgccctggcgtccttggggctgaggatagggctggggctgctgtccaaggtgaggtcactagaggggactctaatccccagttgtttgaggaacttgggcatcctgcagaggatttttggacacctcagccaggcttttggggtggtggggtctggacccagggggaaaaccatggggcatggctttgctgggatagggagggtaggggcaagagtgcagctgggtgtggccctgtaggcacagcatgtggcatctgccagtccccatttcctgccttgcttccagcctgtgctgtgatgcaggaatcacttccttgtgacaggtccgtgccctggcctctctgtggctgagacagggctggggctggtgtctaagatgaagtgtgactctaatcccctgcttctgatccccagttgtttggggaacttgagcatcttccagggacccagtggtgtagatgggactcctgggctgtttagtcaggcctcttgcccacgtggccacattggctcccactcaaatctggccttggggcctgcttggcctctgcttaccaagtcctgtggttctctgccaggcaccattggccctgcggccaggctggcacctggagaatggcctgcccccaaatcctgcactcctcccagctcacctgctttgcttttctcctgcactgggaattgggagctaggttgatactgggagaggagctccctcaactgtaggttcaccttagagttctgggacaggtttttgagagatgaggctttctagaagggcctggagctggtgagcctgctgagcagggagtagtcccacagcagagggatctatggtggaggagtgggatgggtggggaggacgacccagctgtggaggagttggggcaggcaggtcacatgggtgcagctcgccctttctccttctccccatctgtattagtctcttttcatgctgccaataaagacatacttgagactctgcagtttacaaaagaaagaggtttattggacttaaagttccacgtggctggggaggcctcacaatcacggtggaaggtgaaaggcatatctcacatggcggcagcaagagacagaatgagagccaagcaagacaggtttccccttatcaaaccatcagatctcgtgagacttattcactaccatgagaacagtgtggggaaaatccctcatgaatcaatgatctctcactaggtgcctcccacacatgtgggaattataggcatacaattcaagatgagatttgggtggggacacggagccaaaccatatcaccatcctctcttccctccctgtcctctcctgtcttttcctccccgccctgttctctccctcttccccctgttcctcagtcttcctgcctctcttcttccttctccatttctccccttcttcacttcccatttctccctttccctcctcccctgacctctaatcatctttttattgtgacatagaacacaagtatggagacgtacacaccatgtaaagtgtatcttaagtgattactgtaatgcaaacctcacaatgcgccctccagttcaagaaagatcattgtgagcccctcaaggcaccagcctcacctcctagagtagaccactgtcctgattttatggtttttttttattatactttgttttagggtacatgtacacaacgtgcaggtttgttacatatgtgccatgttggtgtgctgcacccattaacttgttgtttcagtggatggtttttctacctaaacatcttcatatacagtaaacgttaattttgctcttttacaatttatatggctgggatcgtaatgtgtctgttctcccgtatcttacttttttgttccccattgttgttgatattcatccatgttgttatctccattgtttaagtctaccctggtacactgattctattatcatgaacaacactgtagggagctttcatatgttgatgtcttgtacacgtttatattcacatttgttggggtttgtgcccatgtgtggaattttaggtgataaggcattcatattcttgactatcctaggaaacaggaaaccttgaaagcagttgtacaatgcacttccccagccacactgtagtatttcctgctgctctagattgccacaatctggtatcgtcagtgttgtgtgaaccatctggtaggtaggtgtcaggggcatctcactgtggtttccatttgcattttctggtgtaatgaggttgaggcctcttcatgtgtttattcgtcatttagtgaaatgtgaatggaatctttcttcccatttatatattgcatgttcttttctattttttccacctctgactgatttgtaggcgttctttctatattcttggtaagagcccttgtttggttagttgttgaaaatgtcttccccaacaccactgtggattagctttgtatgttttaatgattttaataaaaagaagtttaaagtttactataattaaatttatcaatgctatatttctgctcggggtgtggtgtgtgtgtgtgtgtgtgtgtgcattttgtttatgtaaacattcttatctcatggtcataaagatattcttttacataaagagttgtaaagtctttattattttgctttgtccattgaggtctataatccacatggaatggactttgtgtaaggtgtgggtaagagtccaatacctttttaattatttagatatcctgttgtcccagtaccatttaggagaagataatctttattctactgctctgtgtcctctttgtcaaaaatcaagtgcaccatagagggccgtagtttgcttctgagttctctattttgtctcactagtctgtttgtctgtctctatgccaatgtggcactgtgttgactacacactaaagctttagttcttgactctggtagagggagtccttccactttggccttgttcctagagtgtctttgctggttttggccctctgcattcccatataagtttagaaacagcttgttgaattcaatttggagagaactgaaattttgataatattgagtattcctctccataaagctggtacatgttgccatttattttggtcttccctattttctctcaataatttttacctatgtatctctgtaccactcatatgaatgtattaatttatttattccagggcacctgctattttaatgccattgtagatgttatcttctcttaaagtgtacatttatacatgtaagtgctgttgtataggaaattttaattattctatattgttttgtattcagcatttaaaaaaacttttaatattttatctgtagatgctctaagactatatataactctatctaatgcctatttgtttattcctcttcaatcctcagatttttacttgtcttgctttattgcattgtagaatctctaacacagtgttgggtaacaatggtgaaagtaggcttttttgtttagtatctgaacccaaggggaagggtttcttgtttgtttgtgttttgttcttgacagctttttattttataataatttttaaattttggcacagtttcaggcttatgaaaagctacaaaaattttaaaaagtatttctggatacccttcatccagattcaaaaggatagcttttgatatttcaccattacataggaagtttactgtaggatacttttggtagacactctttgttagattaaggatatattattttatttctgtcttctaagagcatttttttaaaaaaggaaagatgatgaattttagaacacatcttatttacatttaataaaatgtgcatatagttttttcttagttctgttaatgtgtccaagtatatcagatgatttttcaatgtgaaacctggcttgcatttctgggataaatctgccttaattggtatcattattctttttatatataatctcattgactttgctaatatattgtgtggaacattttgtctatgtccttgagtggttggattttggtgtcaggattataccagcctcattaaatgaatcaggggatgcagtggcggtttccacttattctaagagatctagtctaccctttccccaacctgctccataccccagaacatggccttttctggattgcatcattcggctacgttgccctttgtttttttgtgggttgatatattggagataaggcgggaaatgaaaaggaagaggagggtgagatgaagtaattcactcccagctgacttcccttagggctacaggttgacagtagctgcacccctctactgatggtcaaaggtcccgtgtgcttgacctttcctgcagttactggtctcagttcattgtagtaatagctccttttccttatctccctttagatatttcgcttttgctagccttgggtgttttcttattggcttcttttaactttgctcaccccacagccaagagccattcattaaactctcctcaggtgtcccatgtgagtttgccatttctttcctgcagggacactgatggatacagagaatgaaccatcattttttattgtttggaagaatttgtgtaaggttagagtggtttcctcattaagtatttgccagaactttccagaaaagctatctgcatgggattttctttgcaaaatctttaaaaattttaatttaattttacagataattagaggactgcatggccaccagcaacagttgcagattcttctgggtaataaaactcacaggcacaatagatgttcacctgactctaaattaacttagatttatgaaaggacaaagaaaaagcatgttcagcattttcagtgttattggtggggtgagagatgtccagcagcagcagtctaacatttcacaccaccattcaggaggatagttatttgggaattgaaattaatgtgcatgaggctcaccttggcatgttcatgtatcactgtctgatccagaatatcttacaacactggaggacagctccatgtccatgttaattcaggaaagtcattgccttgctttcctgacagtcttttacatggtcctaatcatgtcttcattcaatgtccatacaccactcactgccctcccaattcaggtgcaatcccccaagcaaagctttcacaataaacaatgcctgaaatgcagcatttctcattgatctaagtccattctaaggaggcagtgctggaggaaaatgagagcaatgtcattgttccaggattaattatagggagagagcctaggcctgctgttcacagtttgcccataaggactatgcaggatttctctttcttctcatgtcagtatttgaatatttttcttggaatttaaacacttcacctaatttaaaatacagacaaagtttccataatatcttattttttaatgttttattactttttttttttttttttaacagataacgtctcactatattgcccaggctggagtgcaggggctattcacaggtgagatgatagctcactgtagcctcaaactcctgggctcaagcaatgctcccacctcaatctactgaatatactcttattttatatggctgaagggtcttagggagatctccttttaaataatttattcattatttgtgtctttcccatttttctttttaatgtctccctttaggtaagtttgtcagttgttagcagattaatttaatgttcaagaatatttactttgtgctgctatattgccagacagtcttttacatgatcctaatcatgtcatcattcagtgtccatacatcactcactgccctcccagttcaggtgcagttccccatttcccctcactccattgatatcaggctcaggatgtccctagatttggacaatgggatgttagcagacaatagggagttaattgcttcaataggaccatgcagttagtctttccttcccacatccctgtggtcactatgagattaccttttccttagtaagtgatggttctttagggtgagcccctgaatgaatagatgttgatcagatttgagcccaacctacaggagtggccaagtcctaccaggcccacagcttgagtgctcaccatctagccgagcccagcttatatcagctgaaacaccagccaaactacagcacatgagtgatcatcaatgattgtcattttaatctattgaattttcaggttgtttgtgacacagtaaaagtgggccaattgaatccttactttctatagatatgaagagtttgtaatcttttattgatttttatgaaaattgcattgagatcaaattatatcctctattttaaaatcctttgaaatttgttgagatctactttatactctaatacatggtcaattttttaaatgatccccatgcagttaaaaagtgcatattcctccattattacatgccttattctattaagttgttcctaattgtatttttatatcttgtatatttttatttttattataacagctttaatgaagtataaatgacatataagaagcatgtatatctaaaatgtacaacttgtaacttttgacagttgtgaaaaaccagaaaattaccaccacaatcaaaatatgaacagattcatctcttatgaaagtttccttgtacctctttaagtgcctgtctcctgcctctttgtccccttccttctttctaggcaaccactgatgtgctttctgtcagtatagattagtttgcattttctagcacttcatgtacatggaatcatacaacatgcactatttttggtctgagttccttcacagatcttataatcttttggcttcattggtcttgtgtgtatcaatacttcatagctttttgagtcttaaatgttaaaaaatttacatgcagcaaactcaatctttttgatgtggatttccatgagttttgagaactctgtcttatgtaggttttgtatggatggctggagtcataggcacttccactacagtagagatgttgcttcctaacttcagatactccttgtgctgtgcttttgtagtcagatggtctccttgcccttaatcctgagtggccaccagcttgttcttcattccggtggctttgccttttccagaactgcttatcaatgaaatcatgtaagatgtaactttttgagtctggcttctttcaataattttctcattgacaaattctacctacgatcttaaaattttatttattcatttattttttgagacggagttttgctcttgttgcccaggctgccaggctggagtgcaatggtgtgatcttggctcaccgcaacctccaccttccaggttcaagcaattctcctgcctcagcctcctgagtagctgggaatacaggcatgcaccaccatgtctggctaatttttttttgtatttttttagtagacacggggttcctccatgttggtcaggctggtctcgaactcctgtcctcaggtgatccacccacctcagcctccgaaactgctgggattacaggcgtgagccactgcacccggctaatcttaaaattttaaaggtatcaatgtatctttattaatattcattttttcagatgttttaattactggaaataagattacccaatttgtttttttagaaatctggttcttctgtgtcaatatatttaatgtatttttacgtagttactaaaattttttttttattttacgtagtttttaaaattttttaaaaaaattttatgtagttttttaaaattttaccaactttttaaaaaattttacatagttactaaaaatttgtttttaattatgccagctttattggcataattgacaaataggaattgtgtatatttaaaatgtacagctttaacatatatatttacagtgtgaagtgaccaccatactcaaggtacctgacatatccatcatagatttaagatcatatttagaatttataaaaaggtattgaagtcagccagactcaaaggctacatcttgcatgatttcatttattagcaattctggaaaaggcaaagctatagggatgaagagcacaccagtgcctactaatgattaagggtggggagattatttgagtaaaaagggagagcagaagaaactttttgaggggtaggaaacaggtttttcttttctttttctttttttttttgctggtgaggacacttacttaagatataaatttttatcaaatttcaagtacaacagcttctccctttttcagttttgctttctgcagtttcagttactcgtggtcaactagggtccaaaaattggtgaggcagtacaataagaattttcagagacagacaatgaccagatttatataacttttattacagtatattggtataattgtcctattttataattagtacctgttaatctctcactcagttaatttataaattaaactttatgataggtatggatgcattgtaaaaaaaaaaaagcatagtatattgtacacaaggttcagtactatgcataggttcaggctttcacgggggattgtggaatgtatcccctgcagataaaggcggactcctctctacaatagagtattattaatcgtggccaccacgctgtccattagatcttcagagctcacttaccttgcatagctgaaactctgtaccctttgaccaacaacttctcactcattcatcccccggctacactttgccccaggcaaccaccattctactctctaattctgtgagttcagtcattttagattctacatagaagtgaggtcatgcaggatttgtgtttctgtgtctagcctatttcactaggcataatgtcctacaggttcatccgtattgttgaaaggagcaggatttctctcttttttaaaaggctgaatagtattccattgtatattttataaaacatagaaagatagatggatggatagacagacagatagatagcttttgtgtgtgtgtatatatatcacattttctttatccattcatccattgacaggcatttaggttgtttccctatcttggtgaccatgaataatgcttcaatgaacctaggggtgcctatctattgatgttatttcctttagatatatacccagaagtgggatttctggatcatacggtagctctatttttaagtttttgagaaacctccattttgtttttcataaaggctgtaccattttatatttttaccaatagtgcacaagggttccaatttcttcacatctttgcaaacacttacgatttcttgtcttttggatagaaaccatgctaatgtgtgtaaggtggtatgttgtggttttgattgccatttccctgatgattcgtgatggtgaacatcttttcatgcatctgttggtcatttgtatatctttttaggaaaaatgcctatgcagggcctttgcccatttttaattggattgttttttgcaatgagttctatgaattaattacatattttggatattaatcccttatcaaatatatggtttacaaatattttctctcattttttaggttaatacctccagcttcatcttctcactcagaattcttttggctttttgagcttttttgtgattccataaatattttgggatttttttcctttttctataaaaaatgccattgggattcatggaatctgatagggattggcttgaatctgtagatcactttgggtattatgaatatttcaatattcattctttaaatccatgaaagtatgaagtcattttattcagttgtgtcttaattttcctcatcgtgttttatagttttcagtgtgcaagtattacacctctttggctaagtttattttcaagcattttattctttttgttgttactggaaatgtaattgccttcttattttcttttttggatagttcattatcaatgtatataaatgtctccaacttttgtatgtatattttgtatcctgcaacattactagacttatcagtaatttaacaataaattgttaattatgctcaccctacagtgctatagaaaactagaacttattcctcctatctagttgcactttgtaccattaatcaacctttggctataaacccctctcccaaacttttccttgcctctagtgaccattattgtacactctccttctatgagatgaacttttttagcttcggcagatgagtgagaacatgcagcatttatcttcctgtgcctggcttacttcacataacacaatggctccaagttaatccatgttgatgcaaatgacagaattttataattttttatggctagtgtctcattgcatatatatatatatatatatatataccgtattttcttcatcttttcacttgttgatggacactgaggttgagtcaaatcttggctgtgaatagtgctgcaataaatgagagtgctgcaataaatgagtgtgcagatatgtcttcgatatactaattttctttctttttttcttggatgtatacccagtaatgatattgctcgatcatatggtaattctatttttgtttttttgagaaacctccatatcataatgcctatcctaatttacattcctatcaaccagcaagagttcccatttccttgcttcctcactagcatttgttatcttttgtaattttgataatacccatccctactgaggtgagatgatagctcactgtggttttgatttgcatttccctgatgactggcgatgttgaccatttgaaaaatacctgttgaccatttgtatgtcatcttttgagagatttttattcagctaatatgcccatttatacatcagattatttgtgtgttttttccatgttgagctgtttgagttccttgtatattctggatatgaatcctttgtcagatgaatagtttgctaatattctttcccattctgcaagtcatctcttctctctattgatcatttcctttgctgtgccgaagctttttagtttgttatagtcctgtttattttttctttttttgtttgtgcttttgaggttttctctataaaatctttgccaagaccaatgtcctgaaaatttttcttcatattttcttctagtagtttcatagtttctgctctaagtctttaagctattttaagttgatttaaggaaaaatatgattagagatggatgtctggtttcatatttttggcatattaatatccaattttcccagcaccatttattgaagagactgtccaatcctcagtaaatgttcttggcacctttgttgaaattatgttgatggtaaatatgtggatttatttctgtgttgtctatttagttccattggtctatgtgtctgtttttatgccagtacaatactattttttaaaaaactatagctttatagtctattttgacttcaaaaagtgttatgcctccaacttttttcatttttctcagggttgctttggttatttggagtcttttgtggtttcataccaattttaggactgctttttctacctctgtgaagatgtcgttggtatttttatagagattgcattgactctgcagattgcttttggtaatacgctcatttttacaacattaattcttccaatcatgaacatgagacatcttttcacttttgatgtcttcttcactttctgtcatcaatgttttatagcttttttggtagagatctttcacctctttggttaaatttattcttttttttggtggctattttacatgtgattgacttctcgatttcttcctttactaatttgttgctgatgtgtaggaatgctactgatttttgtatgtcgattttgtatcatgtgcctttactgaattcctttatcagttataagagttttttcttggtccttttagggttttctatatacaagatcatgtcatctgcaagcagagaccatttggcatcctcctatccaggctgtatgctctttatttcattctcttgcctaattgctctggctaggacttccagtactattttgaataaaagtgatgaaagtggccattcttgtcttgctccagattttagaggatgacatttcaacttttctttattcagtatgattttggcgatgggtttgccatatatttattttattatgttggggtacattctttctatacccggtttgttaagagtttctataatgaagcattgttgacttttatcaaatgcattttctgtgtctatttatatgatcttacagttcttgttcttccttctgttgatgtgatgtgtcacaagtattgatttgtatattttcattcacaatccttgtattcctgggagaaatcccacttgatcatggtgaattagcattttgctaagctgttgaggttggtttgctagtattttgttgaggatgtttgtatctatgtttattatggatattggcctatagttttttttttttttctgtatgcgtgtgtccttgtctggtttttctatcaggatatactggttttgcagagtgagtttgaaagaattccattcttttcaatttcttggaagactctgagaagaactggtatcagttctacttaaatattttgtagaattctggaaggaagtcagtggagtctgggttttttctttgatgggagatattttattagagattcaatctcattacttgcaattgctcaattcaggagttctgtttcttttgggttcaatcttggtaaattttatgtgtccaataatttacatattttctggttggttttctaatttgttagcttatagttatttgtagcagtctctaatgatattttgtgtttgtgtgatatcagttgtgatgtctactatttcatttttggttttatttacttgtgccttttttcttgtttcatagttagtctggttaatggtctgttgattatttttatcttttaaacataaccagcttttcattttttgatctcctgttttttagtctcaattttatttacttctgctgtgatccttattatagttttcctcctactaattttgggtttgatttgtatttgttcttctagttccttgaaattcattgttaagttttacttgaaatctttctgtttttttgatgtgagtacttactattaaacttcccagttactgattttgctgtgtcctatagatgttgatatgttgtgttggtttcatctgaactctttctactttttaaatgtaggtatttatcatcaaaatttcttgtttatatagcttctgctgcatcccccaggcttttgtatgttgcatttctattttaatttgtttcaataaattttaaaatttactattttttttttttttgggatgaagtctcgcagtgttgcccaggctggagtgcagtggcacgatcttggctcactgcaacctccgcctcctgggttcaaaggattctcctgcctcagcttccctagtagctgggattacaggtgcctgctaccacacctggctaatttttttttgtatttttagtagagactgggtttcactatattgggctaggctggtcttgaactcctgacctcgtgatccacctgccttggcctcccaaagtgctgggattacaggcatgagccaatgtgcctggcccaaaatttacttcttaatttctttattaactcattgttgaattttcatatatttgtgttttagaaaattcttttttttttttttttttttttttttttttttttttaggatagtctcactctgttgccaggctggagtgcagtagcatgatcttagctcactgcaatatccgcctcctggattcaagtgatttcccctgcctcagcctcccaagtagctgggcctacaggcatgcaccaccacacctggctaattttttgtatttcagtagagaccgggtttcactatgttggccaggatggtcttgatctcctgacatcgtgatccgcccaccttggcctctcaaagtgctgggattacaggcatgagccactgtgcctggctgaaaatttatcttgttattgatttgtagtgttattttattgtacacagaatagatacttgatatgatattggatgcatgcattcaatatgtaataatcacattagggtaaatggaatatctatcacctgaagcatttatcctttgtgttacaaataacccaatcatattcttttcatcatttaaaaatgtagaattaaattattattcactactgtcactctgttgtgctatcaaatactaaaccttattcattcttttttaaatggtcttatgaaaggaatttatattttacagttgttggatgaaatagtctgtaaatgtctgttagatttgtttgatctaacgtgcagcataaatccaacgtttctttgtcaattttctgtgtagatgacctgttcactgctgagagtggggtgttgaagctccccaactgtaattgtattggagtctatctctctccttaaatctaataatattggttttatatttctttgtgttccagtgttgggtgcatatgtatttagaattgtcataccctcttggtatattgattgatcttttaccatttgatcccgtatcacttgagcccttattaatgatcctttgtcatggagtcatttatccttttatcattatgaatgaccttctttgtctcttatagttttatgttaaaatctacattatcagatataagcatactgactcctgattgcttttgattttcatttgtgtggaatattttttccatctcttcattttcttttcttttttttttttttgagatggagtttcactttgttgcccagggtggagtgcagcggtgcattcttggctcactgcaacctccacctcctgggttcaagtgattctcctgccttagcctcctgagcagctgggacaacaggcacatgccaccatgcccagctaatttttgtatattcagtagagatgggtttcaccatgttggcccagctggtctcaaaactcctgacctcaagtgatctgtcccccttggcctcccaaagtgctgggattacaggtgtgagccattgggcctggccatcatctcttcattttcaattggtatatatctttataggtgaagtgagtttcttgtaagcagcatatttttgagtcatttaaaaaatatcaattcagacagtttctatcttttaagtggggaatttagtctgttttcactcagagttattgataagtgaggacatattcttgtgattttgttaactgttttctgagtgttgtgtatatcctttgttgttttcttcctctgtcattgtttgtcattgcactttggtggatttctgtagtgataacctttgattcctttctttttctcctttatgtatctgccccacccataagttttacacttttgtgtgttttcatgatagtgattattatctttttgcctccagatgtagtacttctttgagtatttctttttaagcctgtctgatggtgtttaatgtccttagagtttcttttgtggaaaaaatgttattactctctcatttctgaagcatagctttgctctgtatagtattcttgctggacaagttttttctgtcagcactttgaatatattatcccatactctcctggcctgtaaagtttctgtgaagaaaattgctattggtctactggcaatttctttatatgtgacttgacgcttttgctgtttttagaattctccctccttctttgacttttgataatttgactgtaatgtgccactgggaggaactttcagctgaatcttttttggggccttggatctagatgtccattctctctccagacttgagatttttttgcaattatttcattaagtcagttttctatgccttttctcttctcttttccttctgggacttctgagttccaacatttattcacctagtggtgttgcataagttttataactttttttttcactgtttttcactcttatatcttaatttttctgtaattgggtaattttaagtgacctatatttaagttcagagattctttcttctgctcgatcaagtctgctattgacactgtccattttattttttaaatttcattcattgaattcttcagttgcaggatttctgttttttaattattattcctatcgctattgaatttctgattcatatcataaagtttatctgattttattgaattgtgtctgtattttcttttatcttgtcgagtttccttaagattagtagtttgaattccttttccataggtcatttatttccttttcattgatgtcttttaccagcaagttattatgttcttttggtaatgtcatatttccttgcttttaaatgtttcttttggcacttcagtgttatctgtacatctggtggaacaattgcttctttcaaactttttagagttgctttcataaagtaagactttcccctccagttggatattcttgtgccagttggcaagaaattggtgactgtttccaaattagtatagtggtatggtctacatgtagtttccttatctgtgttgaatgttatcaataactatgagtgaccccatggcctagactgcagatgtttgtgacagtggttgcttaggttgttagcatcattggtcaaggctttgggggccttccaattcttatttttctgctcagcaccacaggggaagggtgtaacagctgctcaaagctcagcttggggatgttaggccactgggctggagtgcttcaacagtggcttaacctctggcatgaaggggatctgtggctattagcccccagaacaagatgcactccagtcatagttctaaatgtgagatggcacagtgcaatagctgtatgggccacagggagcaggacacagggtgggcttcttctctggaaggaacacagccatatatatatatggactctaggcagcttcctcagtcaggcttagtgtctaaaatactccagtggtgaggtctgtgggtgtccaatatgttgatgggggttattgggatcctctggtttaccttctcactgaattaggagaagttccttctaattctcagctgatcatgtgtaggggatgggacagtggaggtccagcatttttttttttttttcattctcaatgtaggcatcctgagtttctgtgctcattagagtttctgtgacttttctgatgcattcctgtactctccttcaagtatgtagttgtttattcatattcatactgtctttgggggttagaagcaataagagcttctagtctgccatgttgctgatgttactcctgtaattttattttcttgtagtgtcttttgtgtggatttggtatcaatcatggtaatggtggcttcataaaatgtgtttgaaagtattctctctacttctatttttggaagagtttaaaatagattggttacatatgtatacatgtgccatgctggtgtgctgcacccactaactcgtcatctagcattaggtatatctcccaatgctatccctccccccaccccacaacagtccccagagtgtgatgttccccttcctgtgtccatgtgttctcattgttcaattcccacctatgagtgagaatacgtggtgtttggttttttgttcttgcaatagtttactgagaatgatgatttccaatttcatccatgtccctataaaggacatgaactcatcattttttatggctgcatagtattccatggtgtatatgtgccacattttcttaatccagtctatcattgttggacatttgggttggttccaagtctttgctattgtgaatagtgctgcaataaacatacgtgtgcatgtgtctttatagcagcataatttatagtcctttgggtatatacccagtaaagggatcactgggtcaaatggtatttctagttctagatccctgaggaatggccacactgacttacacaatggttgaactagtttacagtcccaccgacagggtaaaagtgttcctatttctccacatcctctccagcacctgttgtttcctgactttttaatgatcgccattctaactggtgtgagatggtatctcattgtggttttgatttgcatttctctgatggccagtgatggtgagcattttttcatgtgttttttggctgcataaatgtcttcttttgagaagtgtctgttcatgtccttcgcccactttttgatggggttgtttttttcttgtaaatttgtttgagttcattgtagattctggatattagccctttgtcagatgagtaggttgcgaaaattttctcccattttgtaggttgcctgttcactgtgatggtagtttcttttgctgtgcagaagctctttagtttaattagatcccatttgtcaattttggcttttgttgccattgcttttggtgttttagacatgaagtccttgcccatgcctatgtcctgaatggtattgcctaggttttcttctagggtttttatggttttaggtctaaggtttaagtctttaatccatcttgaattaatttttgtataaggtgtaaggaagggatccagtttcagctttctacatatggctagccagttttcccagcaccatttattaaacagggaatcctttccccattgcttgtttttcttagttttgtcaaagatcagatagttgtagatatgcggcattatttctgagggctctgttctgttccattgatctatatctctgttttggtaccagtaccatgctgttttggttatgtagccttgcagtatagtttgaagtcaggtagtgtgatgcctccagctttgttcttttggcttaggattgacttggcgatgtgggctcttttttgcttccatatgaactttaaagtagttttttccaattctttgaagaaagtcattggtagcttgatgaggatggcattgaatctgtaaattaccttgggcagtatggccattttcacgacattgattcttcctacccatgagcatggaatgttcttccatttgtttgtatcctcttttatttcattgagcagtggtttgtagttctccttaaagaggtccttcacatcccttgtaagttggattcctaggtattttattctctttgaagcaattgtgaatgggagttcactcatgatttggctctctgtttgtctgttgttggtgtataagaatgcttgtgatttttgtacattgattttgtatcctgagactttgctgaagttgcttatcagcttaaggagattttgggctgagacaatggggttttcaagatatacaatcatgtcatctgcaaacagggacaatttgacttcctcttttcctaactgaataccctttatttcgttcttctgcctcattgccctggctagaacttccaacactatgttgaataggagtggtgagagaggacatccctgtcttgtgccagttttcaaagggaatgcttccagtttttgcccattcagtatgatattggctgtgggtttgtcatagatagctcttattattttgaaatcgttggaaaagcgcagtattcgggtgggagtgacccgattttccaggtgccgtctgtcacccctttctttgactaggaaagggaactccctgaccccttgcgcttcccgagtgaggcaatgcctcgccctgcttcggctcgtgcacggtgcgtgcacccactgacctgtgcccactgtctggcactccctagtgagatgaacccggtacctcagatggaaatgcagaaatcactcgtcttctgcatcactcacgctgggagctgtagaccggagctgttcctactcggccatcttggctcctcccccgcatgtgtctttatggtagaatgatttatagccctttggatttatacccagtaatgggattgctgggtttgaatggttaaatccaattcttaataaaagcttataaagaaatctatccaatcttaactagtttgaccataatgcaaactttttataaaccttttacaaccctttacaattttctgttgaacagcagattaattctataagaaaaacctgttactcaaatacatgggcccagattctggccctgtatcagtgtgcttttattttattgtttaacctacagagaaattaaataatgcccttcaaatcttagccaactttctcatacccgcagactttccttcacaagattaatgcttcacaaattcttcacaacttgcttgaacctttagtttttttcccccattactcttttaggttaggacaatccttaaaaactgctgaactagacaaaattacatctttttaacaaaagtcatactcccataccttttatcaccttttaccaaaatcacactttaccttccttacacaccctgcatgtgaaactctttcttcagtagtttcaagcacatgttataatattaacttttagcaactcttatttttggtggaaaagatggtaaacaagcaattttaaccatgtatcagattgcagatctcaggatgaggatagagctgcagatagtgtccaactctcccaaacttagccaggggacctggcctaagccttacctaaaatctaatggctataaaacagacaagtcaaacaattatttaaagtcatagaagcagtttatggccttaaaacacatggcaaacaggttcagcctgcctactttagaccaaatgtctaaattttgaatatatttattttattttaccaataatcttttacattgtcttttttaaagaaattagagtcccatgacctaaatccattaaagtttctatttttttctgacaatatgtttaagtgcttatatttaggacaattaattacagctcttttacaccacacacgtaacacacataatacacagacaaaaacggagatccaagacagaatttcatcaataaagaaatctttagagggagagtgggggctttaaaacaatattcacgcatatataggccaaatatcagctttaattaagtcaacttttaagtatagagatcttaagattctttaaaaatcttttattaccagcttttagccaagacaaagggccaatatttctggcttttgaattttttttactaaaggcaaccttctacatgaaatcagtaagtcttaactaagaggatggtaaccttggatgcatgaagtgtctccaaagagatggcaagcgatgggcaaagagacggcaagcaatttttatgagatgtagaatctccccaaaggtagttcaggaaaaagaaaatttcaagacacgaaatcagaagctgtccacaaagaggaaaggaagcaataaatggcaaaaagtcaaacacacataaaatcagaaaagactgattccctaagccaggaattgaacccaggccaccagcatgaaaagacaaaaaccttaactactgagcacaaggtgactgaaattgcttttcctgaaaggaatcttgagcagttatttttgaagttgcaaaggattttaactattcaagagaattaaggtgagaattaacataataatgtcccttttttagacccaagaatcaaagctttgtaactcaactgcacagggctttaaaggcaatacagaaagttacttggatgaataaccttttcaagtgcacaactggaattaacttttagataacttttgaattagataaaattattcttttttaaaaaaaaatagaacacattttccttggcacattttatgtaaacccaggaagcaagaaatcctaaattgcctatcagatactagcattttatagatgagcaccattctacaattttggaacgtgttctcaatataataatcttttcttaattggaaatgacccaggtatatacccaaagaattataaatcactttactataaagacacatgtacacatatgtttattgtggcactattcacaatagcaaagacttggaaccaacccaaatgtccatcaatgatagactagattaagaaaatgtggcacatatacaccatggaatattatgcagccataaaaaaggatgagttcatgtcctttgtagggacatggatgaagctggaaaccatcattctgagcaaactattgcaaggacagaaaaccaaacactgcatgttctcactcataggtgggaattgaacaatgagaacacttggacatagggtggggtacatcacacaccagggtggggggaggggggagggattgcattaggagatatacctaatgtaaatgacaagttaatgggtgcagcacaccaacatggaacatgtatacatatgtaacaaacctgcacgttgtgcacatgtaccctagaacttaaagtatatattttaaaaagtcagatgaattttctgcctaggaaaaagcatttaaattataattcatagttccaatgagttggcagtgaaattggggccatgagatgttccagcagcgatggagatggggcaaatcttatagtattaacatcacaccatttggcaataatgtcaaaagttacaaaaatacttgaaatcagtaattatgagaatgtatactgggaaaactttcaaaataaattcaatctatatgcaaaaaaagagaatgttccaatacttgaaatcagtaattatgtttatgagaatgtatactgggaaaactttcaaaataaattcaagctatatgcaaaaaaaagagaatgttcctattccttatttataatccttaaatagtgttcctattcctgaaagattaaagtcgcatgaagtaaaaggcattacagcttttatttttccttcaaaaaatattttatctaagtgcttatttttaaagccagttaattataactttttttgtataaccattacacacataacatatatatgactacacagacagaagaaaacccagcagttgtaaggtttttttgttcgtcaattttctaattggattattggcctcagggtggagctctttaagaacagggctaggaaagcatacagtttctagggcctaataaacaggcatacctgaaaggcaaaaagagattttgagtgggttatattcacctctaattcttggggtttcatgaggaaaagagagatgtctcacaaaatggaatccttggcattttttttttttccccaaggagtcccaggccatcagaagctatctagggcctttcatacatgcactgactggcaagacaaagtggagaaaagtaatttagtcaactgagaaaaaaaaaaaccttttcagaaaaacaagatccaaggagagaaaaacataaaaatcttttaaatatatctataacttggatatcctcttttaattaagctgagcattctttaagaatatcctttttcattaattaaaactttacagggaatataaacaatgattcttatcattcctttcactggtttgcacagggacagagaggccaaaagtctgactgtaaaaaaacttttatccttttaccagcatgtctggcttctgggttttctaggggagtttctttgaggtcctccttggctgcataggtttgcatgactgttcaaagccatattcaggttcttcagtttcctctgggaggaaagtgtctgggttcaggcaaggacaggtttttttaactggactgtagattcctctaacagcagagcctgatctttgaggaggtgattatctgttggccagggacttctcttagaagacagcagttctgccgcattatgtgggttatatacagttaagtcattcctcatggttaacttggtggccactgacaccagtaaagccactgctgtaactgctcagaggcaagctggccgtactttagccatcaactcaagctccttgcttaggtaacctactggctgttgagctggaccttgagcctgagttaaaactcccagggccattctcttcctttttgctacatagagactgaatgtctttcctatgggaagactaagggctggtgctttaagcaaggcttgttttaactggttaaagcctttttgagccccaggttcccaagtcagggactgagttttagctgcttgcatttcttttatgaggtggtataaagggcgagttatctcactgtacctgggtattcctagtttgcaaaattcaataatgcctaagaatcccttcagatgtttaagcattttgggaagggcaaagaggaaatgggcttaatcatttccttacctagtgctcttgttccttctgacaggactagatataggtactttactgaagtttgaaagagctgagccttaaattttgaaaccctatatcccctttcagctaaaaaattgaggagagcctcagtgtcttcctgagactttctcagttggggcacagaggagaatgtcatctacatactgcaaagcttcaacctgagggtgagaaaaatcagagagatctttggacacggcctgtttttgcaacttccttcagatattaggggctgcctgagtaataaacttgtcctttaagattagctgtccttcaattgaaatgagagatagaaaggtgtgtttcactaaagcttctctcagcctttccaaaaaggctgaggggttttcatctaggtttttttttttttttattatctattatggaaagcttgtagtagttaataggtttggctatagtcctttgtggcttctccaatatacgcatttgaaagagttttcttctccactcaccaatgctattattatggtcacatttagggtcctttaagggcactattactctcccaattggataaggctcttccccttccctggcactgtatgagacacaaagttcatctccaaatttctttgctgcctacagggccaactgtttctcagcagcagttagggtttgatttaagagtaacctaacatccttccagcagagtttaaatactctatatgtgagtgaagttgggactttcctaaagcaaacttcagggtctgacgattaaaagagatccaggctgcactcgaggaaagtgcaggcttgaagatgggttgttaagtatctggaaagagaggggagaaaaggcataccttagtccacttcctccttttggagtgacccagggtacagagaaaggtagaaagggcgtcctccttctcctctttcctcccatctcctctgggtcctggtggccatcaattgtgctgcccatggatgcaagcattaccacccatggatccagaggagctagtcagcaggagtagtcatgtttacctgtgagattccctagctctctacctatctctgggtatcccagacctactcgacctaaaaggctcccatggtaccccaggggcccaggagggattgtgcagtagttggatttgagtaagaccatttaatggaaggagtgtcttgactctgtccctggcttctcttactgtggccctagcaaagccctgatttcccagagaatgggaccaattgacttctaagcataaaatcctcttttgtttaaatgccaatgtagttgtgtttaggacaggtgcctcaaaaaatataaggattaaatggctgtcctaccttcgatgaggacagtactgagcctagaatttgtctctcaagggcagcttcctcctgactattgaaagtggagttttcctgcctacaaatagggcatgaggtctgatcacttatagagggatgcaggaggaaaaagagttggggaactagaggttttgggaaaagggtcaatatggccccccaacacagaaaaatcctattttgctaggtgttgtggcaataactgaaatgttaggtaaaaactgtgactccaaattctttctaggcagagaggtgtggggcttggtgggctgtccccacaatatgcctcccagcaaaaatacaatttgtctcatggaggaactgtttaaattcactggcagtgctgagcttttatgtggaggaataaaacaacccaaatggagaggagggtattcactcaggttgaaatatcctcctatagagtgccatgaatgactatcattggggaacaaaaaagcccttactaggtgaaagtttagttcagtttagtttagtttagttgaaagtttagttgaaatcttgaaatccccccatctcaaggaaatcacagaagcagcaattcttagagttacattcctggttactaaggcacttgctaactttacccaacaaggttatctccccaggctgtaaaaactccctcaacatagcatacaaagaagggataggagacatgagagctgcaaaaaagaaaagaaaggaagaaaatgtgataggaaagtctggaagtcctggtgggctgttggggactggagttagtccaggagtcttcaggtaacaccaaggtgcagcctccgccagatgccttcagttgccccaggaccttcttccagccccacatgatggctagatcttctgtgaaagggagctaggttggaacagagccaacattcccaacacccaagagtgatgggggattgataaagtcctctccatcaagcctgtcccctgaatcttgtaaggctggcagccactctagaagcttttaataggctgacaggggcccagtgttttgtttgatcttacaagaaaaaaacagaggataaggagccttggaaatgaaagtacagtgttggaggtcctctcctactcatctttctgatgtttcctttcctggccaatgcaccagtgttgcattcttgttatctgaggtattactcagagtattatctgcttattctactgagtaacatttctgcagtttgcagcaaaacccttaatattataaaagaagtgaggtggagccaagatggccgaataagaacagttacagtctacagctcccagcgtgagtgatgcagaagacggctgatttctgcatttccaactgaggtaccgggttcatctcactgtggagtgttggatagtgggtgcaggacagtgggtgcagcgcaccgagtgtgagacgaagcagggcgaggcatcatctcatccgggaagcacaaggggtcagggaattccctttcctagtcaaagaaaggggtgacagacggcacatggaaaatcgggtcactcccaccctaatactgcacttttccaatggtcttagcaaactgcacaccaggagattatatcccatgcatggctcggagggtcctacaaccacggagcctcgctcattgctagcacagcagtctgagatcaaactgcaaggcagcaatgaggctgggggaggggcgcctgccattgccaaggcttgagtaggtaaacaaagcagccaggaagctcgaactgggtggagcccaacacagctcaaggaggcctgcttgcctatgtagactccacctctaggggcagggcatatccaaacaaaaggcagcagaaacctctgcagacttaaatgtccctgtctgacagctttgaagagagtagtggttctcccagcacacagcttgagatctgagaacggacagactgcctcctcaagtgggtccctgacccccgagtagcctaaatgggaggcacccaccagtaggggcagtctgacacctcacacagccgggtactcctctgagacaaaactttcagaggaacgatcaggcagcaacatttgcttttcacccatatccgctgttctgcagcctccgctgctgatacccaggcaaacagggtctggagtggacctccagcaaactccaacagacctgcagctgagggtcctgactgttagaaggaaaacaaagacatccacaccaaaaccccatctgtacgtcaccatcatcaaagaccaaaggtagataaaaccacaaagatggggaaaaaacagagcagaaaaactggaaactctaaaaatcagagtgcctctcctcctccaaaggaatgaagctcctctccagcaacggaacaaagatggacggagagtgactttgacgagttgagagaagaaggcttcagacgatcaaactactctgaactaaaggaggaagttcgaacccatggcaaagtagttaaaaaccttgaaaaaaaattagacgagtggctaactagaataatcaatgcagagaagtccttaaaggacctgatggagctgaaaaccacggcatgagaactacatgatgaaagcacaagcctcagtagccgattcgatcaactggaagaaagggtatcagtgacagaagatcaaataaatgaaatgaaatgagaagagaagtttagagaaaaaagaataaaaagaaacgaacaaagcctccaagaaatatgggaccatgtgaaaagaccaaatctatgtctgattggtgtacctgaaagtgatggggagaatggaaccaagttggaaaacaatctgcaggatattatccaggagaacttccccaatctagcaaggcaggccaacattcaaactcaggaaacacagagaataccacaaagatactcctcgagaagagcaactccaagacacataattgtcagattcaccaaagttgaaatgaaggaaaaaatgttaagggtagccagagagaaaggtcgggttacccacaaggggaagcccatcagactaacagctaatctctccgcagaaactctacatgccaaaagagagtgggggccaatattcaacattcctaaagaaaagaattttcaacccagaattttacatccagccaaactaaccttcatacgtgaaggagaaataaaatcctttacagacaagcaaatgctgagagattttgtcaccaccaggcctgccctacaagagctcctgaaggaagcactaaacatggaaaggaacaactggtaccagccactgcaaaaacacgccaaattgtaaagaccatcaatgataggaagaaactgcatcaactaatgatcaaaataaccagctaacatcataatgacagggtcaaattcacacataacaatattaaccttaaatgtaaatgggctaaatgctccagttaaaagacacagactggcaaattggataaagagtcaagacccatcattgtgctgtattcaggagacccatctcatgtgcagagacacacatagtctcaaaataaagggatggaggaagatccgccaagcaaatggaaaacaaaacaaaacaaaaaagcaggggttgcaatcctagtctcggataaaacagactttaaaccaacaaagatcaaaagagacaaagaaggccattacataatggtaaagggatcaattcaacaagaagagctaactatcctaaatatatatgcacctaatacaggagcacccagattcataaagcaagtccttagacacctacaaagagacttggactcccatacaataataatgggagactttaacaaacatcccactgtcaacattagacagatcaacgagacagaaagttaacaaggatatccaggaattcaactccgctctgcaccaagtggacctaatagacatctacagaactctccaccccaaatcaacagaatatacattcttctcagcaccacatcgcacttcttccaaaattgaccacataattggaagtaaagcactcctctgcaaatgtaaaagaacagaaattataacaaactgtctctcagaccacagtgcaatcaaactagaactcaggatcaagatcctcacttaaaaccgctcaactacatggaaactgaacaacttcctcctgaatgactactgggtacataacaaaatgaaggcagaaataaagatgttctttgaaaccaacgagaacaaagacacaacataccagaatctctgggacacattcaatgcagtgtgtagagggaaatttatagcactaaatgcccacaagagaaagcaggaaagatcaaaattgacaccctaacatcacaattaaaagaactggagaagcaagagcaaacacattcaaaaagtagcagaaggcaaggaataaataagatcagagcagaactgaagaagatagagacaaaaaaaaactcttcaaaaaatcaatgaatccaggaactgtttttttgacaagatcaacaaaattgatagactgctagcaagactaataagaaaagagagaagaatcaaatagatgcaacaaaaaatgataaaggagacatcaccaccgatcccacagaaatacaaactaccatcagagaatactataaacacctctacacaataaactagcaaatctagaagaaatggataaattcctggacacatacaccctcccaagactaaaccgggaagaagttgaatccctgaatagaccaataacaggctctgaaattgaggcaatcactaatagcctaccaaccaaaaaaagtccaggaccagacagattcacagctgatttctaccagaggtacaaagaggagctagtaccattccttctgaaactattgcaatcaatagaaaaagagggaatcctctctaactcattttatgagggcagcatcatcctgataccaaaggctggcagagacacaacaacaaaaaaaagaattttagaccaatatcgttgatgaacatcgatgcaaaagttctcaataaaatactggcaaaccgaatccagcagcacatcaaaaagcttatccaccacaatcaagttggcttcatccctgggatgcaaggctggttcaacatatgcaaatcaataaacgtaatctatcatataaacagaaccaaagacaaaaaccacatgattatctcaatagatgcagaaaaggccttcaacaaaattcaacagctcttcatgctaaaaactctcaataaactaggtattgatgggatgtatctcaaaataataagagctatttatgacaaacccacagccaatatcatactgaatgggcaaaaactggaagcattccctttgaaaactggcacaaggtagggatgccctctctcaccacccctattcaacatagtgttggaagttctggccagggcaatcaggcagaagaaagaaataaagggtattcaattaggaaaagaggaagtcaaattgcccctgtttgcagatgacatgattgtacatttagaaaaccccatcgtctcagcccaaaatctccttaagctgataagcaacttcagcaaagtctcaggatacaaaatcaatgtgcaaaaatcaagcattcctatacaccaataacagataaacagagaaccaaatcgtgagtgaactcccattcacaattgcttcaaagaaaataaaatacctaggaatccaacttacaagggatgtgaaggacctcttcaaggagaactacaaaccactgctcaatgaaataaaagaggatacaaacaaatggaagaacattccatgctcatgggtaggaagaatcaatatcgtgaaaatgggcatattgcccaaggtaatttatagattcaatgccatctccatcaagctaccaatgactttcttcacagaattggaaaaaactaaagttcatgtggaagcaaagaaaagcccacattgccaagtcaatcctaagccaaaagaacaaagctggaggcatcacgctacctgacttcaaactatactacaaggctacataaccaaaacagcaaggtactggtaccaaaacagagatatagaccaatggaacataacagaaccctcagaaataatgctgcatatctacaactatctgatctttgacaaacctgacaaaaagaagaaatggggaaaggattccctatttaataaatggtactgggaaaactggctagccatatgtagaaagctgaaactggatcccttccttacaccttaaacaaaaattaattcaagatggattaaagacttaaaccttagacctaaaaccataaaaaccctagaagaaaacctaggcagtaccattcaggacataggcatgggcaaggacttcatgtctaaaataccaaaagcaatggcaacaaatgccaaaattgacaaatgggatctaattaaactaaagagcttctgcacagcaaaagaaactaccatcagagtgaacaggcaacctacaaaatgggagaaaatttttgcaatctactcatctgacaaagggctaatatccagaatttacaatgaacccaaacaaatttacaacaaaaaaacaaacaaccccatcaacaagtgggcgaaggatatgaacagacacttctcaaaaaaagacacttatgcagcctaaagacacatgaaaaaatgctcaccatcactggccatcagagaaatgcaaatcaaaacaacaatgagataccatctcacgccagttagaatggcgatcattaaaaagccaggaaataacaggtgctggagaggatgtggagaaataggaacacttttacactgttggtgggactgtaaactagttcaaccattgtggaagtcggtgtggcgattcctcagggatctagaactagtattaccatttgacccagccatcgcattactgggtatatacccaaaggattataaatcatgctgctataaagacacatgcacacgtatgtttattgcggcactattcacaatagcaaagacttggaaccaacccaaatgtccaataatgatagactggattaagaaaatgtggcacatatacaccatggaatactatgcagccataaaaaatgatgagttcatgtcctttgtagggacatggatgaagctggaaaccatcattctcagcaaactatcacaaggacaaaaaaccaaacactgtatgttctcactcataggtgggaattgaacaatgagaacacgtggacacaggaaggggaacatcacacaccggggcctgttgtggggtggggggaggggggagggatggcattagtagatatacctaatgttaaatgacgagttaacgggtgcagcacaccaacatggcacatgtatacatatgtaacaaacctgcacgttgtgcacatgtaccctaaaacttaaagtgtaataaaaaaagagaaatttgtaaactttcttagaacattatgagttttttttttttacaattttttttttttagctcatcattctatcgttagtcttagtatattttatctgtggcccaagactattcttcttccactgtgggccagggaagccaaaagattggacacctctggtttacagggtagataatgaatatttctataaaaattgtatttctatgtactaacaatgactaatttaaaattgaaatttaagagtactttttacaagagcatacaacatatacttgagacatataagatttgcaggatatatacactgaaactataaaagattgcggagaaaaattaaagatctaaataaagggagagatatgccacgtttatgggttacaacactcaatattgttaacgttaaaattctcttcaaattgatatacatatattcaatgcaatcccaatcaaaatccacaatacttttattagaaaatgacaactaaattctaaaattcatatggaaatgcgaagaacttagaaaagccaaaaacaaaacaaaataaaaacagaaaaaatttgaaaagaagtacaaagttaaaggaatacattgcctgatttaaagacatagtgtaaaattatgttaaataagactttaaaatattagcaaaaatacagattaaggaagtgcagaaatagaccaacaaatataagatcaaataattttaaagaaaggtgcaaaggcaactcactgaagatcgtgttttaaagaaatgttgttgaatgaactggacatctgtattaaaacaaaaaccaaaaaacaacactgtaaagctgtgaccccaaacctcacatggtatacaatattcaagaactacctcaaaatggattataaacctaaaagtacaaaactttaattaagtaacatgagataatttcttaaatcttggcaaatacttctgagatatgtaccaaaaatatgttcaatcaaaggaaaaataacacattcaactttgtcaacagtaaaattttctgctataggacagactgttaagatgaaggtaaaaaagatccataggctagaagactatactggcaaatcacatatctgaaggaggacttgtattcaatacttattaagaaccctcaaaactcaataataaagaaaagagtttaaatgggcaaaagatttgaacacttaaaagtccaaagaagacagagggatggcagtagtacacataaaaattgtaaacattagtcattagggggatacaaagtaaaatcacagagaaataccactacacaccaaatgagaatggtgaaaattaaacactgaccataccaagtgttggtgaggacatggagttcctgaaatcctcgtaacactgtggagagaatataaaatagtataaccactttggaacacaatttgtcagtttgaaaaaggtaaacatccacttaccctgtaagttggtgtgcttatgcttattttctgtattttatggtgacatctttaaaagtttgctggctctggagagactgcccctcccagggctagccctttcttagagatggcaaaagccttgacccagagcacctctctcatatacagccaaccagtctagagtctacagccccaattacctctttatccaactctcacaccccacgccaatatctctcctgcactaaagcaccccaggaccaagtaccaggtaaccagagaccaaccctgtaggccaaagcctgctgaaattatgcaaactagctaatcacaagctgcttactctgccctgcctggtcttttccatggaaaccccaataaaggctgtggcctatgttttccccttgctcctgcctcctgaccaacactggtgctttccatgtggccctctgtggcacgatgcctttccttctcttggaaaatgtgaatggtgaattatttcaatggcactggcttctctgtgttgtcacttagtcacctgtataaattaacatcccacaggtagaaatgaaacactcagtcctgttactcctaggtattaacatataagaaagactagtacatgaatgttgatagcagctttatttgtaatagccccaaactagaagcaatccaaatgtcctttaacaaatgagcagcaaaattgtggagtatctatataaagctatacacgagtctgtaataaaacaatgaagtgttgacacatgcaacatggaggaatctcaaaataattatgctgagtgagaaaaaagcaaaaaacagcattttgttattccatttatgtaaagttttagaaaaagaaaataagtctacagcaaaagacagtaaatcaatgtttgtggcaatggggtgccagggagggagggaaagagggattttaaagggggctgagatgactttgcaggtgatgaatctgctcattatcatgattatggagatggtttcctgggtgtacacattagataacacttaatacatttacattttaaatatgcacagtttactgcgcaacaatatctcaatagagctttaaaaaatggctccacataaaaaatctgggtctcctgcttctcttgaaaaaccagaaaatttagtacatatataagggactccataactattctcattctttggaagggacagccctgcttcaatgggagcaaagactagcgagcaataaagcttgtttgtgagtcacagaagtcacatgcctagactctgatctctcctctctgtcccgtttcttgcttgtgtagcaatggcctagaggtgaacagccacaacagcctcagcaatccagaacacattcagattatttgctctgccattgaccttgtgcacaggagactaaatctggaagtcctgaaaatatctgtgtaccctcatgcctcacagctatagcacactctggaagcatgtttagatggggcacataccctctattttgttgccctgagctctatgaatcacatgcagtatgtgaatgtaattatggtggtctgcaatggcctcagcccactcatgatttcctccagggaagcggagggagtacagaggtctgccttcactgagcaccctgggtaacctaaggtacacttgccagctggtagaggtgaaatggcttctcccacaggtactggcagtgacagaactcaggtaagagccttgggcaggttagaaagtgcaatgcaactcctgaaagcttcccacctacctggcactcacacggaatctctccagcatggatgtccagatgtgagattaacttttggctgattgatagctactacacaaagctactttcagagcttctgtccggtgtcacccactatgtggaccaagcagacagcatcctccctgcgttccaaggccttcctccagggtgaactttctggcaccacataggctgttggtttaagccttttctccagtgtgattttttttttatatttaatgaggttggacttgtggctaaataatttcctacattcactacactcataaggtctttttctagtatggactctcaggtgttgaacaagtatagatttaacgctgaaggctttcccacattcgctgcacacatagggcctttcaccagtgtgaactctctggtgtaaaatgaggctggatctttggctaaaagatttcccacattctgtgcactcacagcctttcaccagtgtgaactctctgatgtgcagtaaggccagagatttggctaaaaaccttcccacattcagtgcacttataaggcctttctccagtgtggattctccaatgccgagcaagtgtgattttgcagctgaagcatttcccacattcactacacttataaggctttgccccagtgtgaattctctggtgttcaataaggccatagctttgtctaaaggatttcccacattcactgcattcataaggcctggctccactgggaactctcgggtgtataatcatgctggaattctggctaaataatttcgcacatttgctgcactccagtgtggactttctccagtgtggactctctggtgctgaatgagtgtgtgtttgctgctataggctttcccacattcactgcatctgtaagccctttctccagtgtgaaggtttttatgcctaacaaggtgggtgcttctgctgtaggcttttccacattcactgcacccataaggcctctctccagcgtgaactttcttgtgttgaacaagatgggagctttttctgtaggctttcccacattcgctgcacccgtaaggctttaaacccatgtgaactctctggtgtacagtaaggctagagttatgactgaagaatttcccacattcactgcatttgtaaggtctttctctgctgtggactctctggtgctcacaaagcctatttctgtggctaaaggctttcccacattcactgcacctgtgatacccttctccaatgtgaaaggcctccttgcactcagtatttctgggtgaattctgggtctggtactggagaaggcctgacctgggcaggaggtccttctcacagtacccacatgtgaagggattcactgacatgtagactctgcagttcttaacaaagccctatccttatctctgctgaggcatttctctccactgtgctgcctctggtgctagggggtgtctgtactgacccagaattgtctcccacatgccccccgtgtgtgcagtttgtgcccggggtgtattccctgatgctcagccaagagcaaaatgtctttcatgattggaccacaaatcccacaaggggaggctttctgggcagctggacctgccttaggagccctgacctgtgacactccttgagaagatggctcctcatcctccattagaaaccaacaacctgaaagcaaagaaatattgaagtatacatacagcctggtgggatctactgggttcattgcaagactcctggtctaggactgactttcgtgggagaggcagccctatcacagtgtgtgtcttacaaatgcaggaacaagtacacaggactcttggggggctacgggggttacaggtgacaaagagtctactgtgctaagcctggcatcatgatacaatggggaggtctagggaggagcaagggcacagcgatgggatgcagcccaggaaggagaggctgcatctccctctcacttctctgcaatggcttttagcaggagcttgtctgctggtgacacaggagcactgaacaaaagggtgtgtccagactcaggaaaaccaactgcaactgagtagctgttcaagaactacttaggctatgtgaacatctcacaaaacattatgtgtagctcagggttagagaacactgcagagggaacagtggaaaggaaggggtgagacctggaaatcagagaggtgggagtcggccctggccagattcagtgtaggaaagagaaatgggcaaaatgtcaagaatgcaaaacatagaaaagagttatggcccctgcccttggtataaaaacaatgatggacactggcaaggttgctggaatcatgagaactcagccctgacgttaagccatccctcacttcccacttaccagagccagtccccgccagagtccctcctcccatagctttgtcaggcatccatgtctcttcctccagccccaagtggacaactacctgagtctgggaagatgcaaggcctaagggaaagacacgacaggtgagtggacagcaggagcgcagagtaacccaccccatgacagaccccaggaaagaaaactagtattacaaaaagagcctcagaagaagatcccataggaacagcccagtggtccctgaaaatagtaaccacattggtcctgcaattcccagcacagtgaggcatgaggaaatgccaccaggagggaagggggcagaattgggggcagagaggtacaatgattctgcatagtcactctgccagggcgaggccaagcctggtgggatctattgggttcactgcaagactcctggcccccatctccttccctgcaaggccttagggcaccaggtagtggggctgcctggggaggggacagagaatgcactcagtccagccctggcacccacagcatctatgcaagaaaagctaggaagggagcaatgtccacagcctggctgtgggaaggaaacagcagctcctggaaaaaagcggaagcaaagagcccagcctgggatgctgaggtatgagggacttacccagcgaggccacaagtgcaaagttctccagcatcacatcgcagacagacaccgggtccatcgtgagtccctcgagcttcaattcttaaaagtgctacactccacaactcatcatgagacaggcaaaatcataaaaaaaaaatggctgggtgatttttctaaaattgctaaaatggttgataataaatattttgtgttatttatttatatggtttttattttttcctgatcagatctataaggcaaaaactctctctagagaggaaaataatgaatgtttggtttgtcaaacccgtaattctggaaaggcaattaaaatttcaggtgggaatacaccacccgatgggctatttaaaaattgacagatggatttctctcaattgccaacttcaatggcatatcagtatgttctcttaagagtttgaatgttttctggttgggtagaggtaggtaagctgaggctgtgacagtagtttaaaaagtcattagaaagttattagaaaatgtgtttccttgctggggcatccctggagaaatccccagtgataaagggagaccattttacttgacaagttataaagtagttatataacataagatgtcatggacacagtggcattaacactgtccttatcaccctcagtcttctggaaaggtcaaaaggacaaatggcattttgaaactgaaattgggctgggtgcagtggctcacgcctgcaatcccagcacttttggaagctgaggtgggcagatcacttgaggtcaggagttcgagaccagcctggccaacatggcaaaaccccatctctactaaaaatacaaaaaattagcctgtggtgcatgcctgtaatcccagctactctggaggctgaagcaggagaattgcttgaatccaggaggtgaaggttgcagtgagccaagattgcgtcactgcactccagcctggatgacagaggaagatcctgtctccaaaacaaaaaaaaaaaggaacacccatccccccccaaaaaaacaaacaatgacaacaacaaaaacaaaaacaaaaacaaaactgaaatcggcaaagctcattgaattgattatatttccacggccaactgtattaccattggccttgatagcaatcagattcatccccaccagaaagcataaattggcccctgataaaatagtcactggaaagtttatgcccctaataatagaatttcactctcttaaactctgatatgactaaatacttcaaaggtttaatgccaaaatatattatcaccaggtaaaggaagcttttcatgatccaccaatgagaacaatcaagccctgcatgatttggaatctggagattgggtcttctggaaatgatatcagaggaagattgcccttaaaccccaataaaagggaccatatcaagttcttcttcccacccaaattgcagtaaaacttcagggttgcaaaccttagatctacatcacacaattcaaagggacctctgcagactcttgaagtttttctccagaagcagacagcatcttacatatgtacagctctcctaagaccatgggccaagacttacctccatcctgaaagccgtatccttttactttttttcccctaattttcttctgccccaattatttccttttccttacaggaaaatccatgggaccataatctgtggatagctttacctaaggcttattctgtagcaaaaaacttgagtaatccttgggcttgtgggttaatgccaaaaactcaagaagcaatttcacaaatgccaatgcctccctgtgttcccaattcaccctgacgctccaaaggaagaacagaaagctatcttgatattctagacatcactaccacttgttttcctacacttgctggaaacaatatcctaacctttccaattagtaacctaatcactaccaaatatagaaaacacattcgagtgatgcctgcaaaagatgtattatgcttccaggcatcacatactcaagatctggggactatgtatgcaggctattcgtgcatagtatcataagtaattgctatataatgtcaccagaacaaatccagtagggtccttcttcatgtggttatacaccttaacagcatgctgtaaagggaccacaaagaattttcccactgaactttgttcaggagccatcaggcttacaggtcaaatttaacttacttctgctcaaacaccaccaggaggcgctcttttccaatgcttgaggacctatcttgggtccgcagagaatttgcttaccctttcttcctcttcactggtttagatcttgctctttgatgggtctcactcctgccttttgaatagcttcctctgacagttcccataataccttccataatcagaggccaaaacagtaaacaaaatgatcatcggccttgaaagagactaagataagctagtttctactgaggaaaggttccagtggggttcctgagggcttgctcttggtggtagtagggtgctggtagtgtggaattcagaacagatccataaattggggaaaatcttggactttatggccaaccaaaccttccagtggttcagtagaagccaccctccaaaaggtagatgataacctatgcatctaacaaaacacttaatagaatatcatgcagcttaatttatttgagataaggtcttgctgtgtcacccaggtgggaatacagtggggctcactgcagcctcgacctcctggactcaagggatccccccacctcagcctcctgagtatctgggatcacaggtgtgcaccagacctggctaatttttaatttctctttttttttttaaatagagacagggtctccctatgttgcccaggctggtctcaaactcctgggctcaagtgatcctctcatcttggcctcccaaagtactgggattacaggtgtgagcccctgcacccagcctcatgcagctttacatcattttgatcatgttggggacttgtgctgaatcaaactgagtgctgtatctacacttcccctgattttgctactatggaaagcttaatttaaaaggtggctatttctttagatacttttatcaaatacatgaagaaaatttcaatagatgaagaaaaaaaattttttttaactctggtaaaatatacatagcatgaagttaatcattttaactatgttaagtgtatagttcagtggcattaagtacattcacgatgttgtgccaccatcaccactatcgatgtccaaaacttttcatgaatggcaagcttagcttttccagggtttttgaatctttatgtttttttctggtgggtctccaggttactatgacttacagtaccaggctaatgacataaactgatacctctttattattatttttttccagatgtgaaattataaatgcagggacttagagctcatacaactttaaaaaggttgggaaagtgaagttatcaccacttggttatatctcctaaggaaactaatttgaggtctccccttctcaatttttccttctttataggtactattaatgccctagcccagcaacctgacttattattgaatatattcggggtgtgatggtgaatacttaatcaccatcacaccccaaacaaagattatgaccaattggactcaaatactattgagctgcttatatgcctggactttgacttgtttggttttgactggttttgttcatagggcctcctgtgaaggagtacactttggtctcttggtattattttctggtagtcatcgtaatagtccccctggtgcactgtatcctgtcaaatcttaaatgtgtgtatgcagacatccattgtgcactgaatggtctccctttggctagatcagcaagaatacaattatttaactgatctgacatcatgacttgtgaattccgtgctgaggccaagtaagtctaatacaatggtgacagacagtgtcaatgcccagggttttggtcactatgtcaaaatccaatggctgacccaaagtggggaattggcaaattgaactaaatttggcctgaggctgtctccatatcttgagtcctcgtggagctggtttggagtttcgttttggaatttggtagcggaaggtcaaggtcgtttgccagatggctataacttctctttatgctcaaagatcttgacagtatgtaaattgggtgatcaccttttctatttctagttttggttgatcttctgttaggtttgaccaactcttggcccctcttatgtcgactaaaactcctgcagctgcagaaagtcaagttccagcactagaaacaaggaccagttaagagaaatcattttaccccaaaaatatatttctttgacatattttgaagggaccctgctagatctttcctagtctagatctaggaaagattagctaaaggtcttcattctgaaggctcccatatgtacacattaaataaatttgaatgccatttcttctaaaaatcaatcttcctcatgtcagtgatttacagtaaacctttcaggggctaagagccttgtccccacagttttggtgcagcaagcagggtctccaatgccactctgctgttttggaagctgcagtgaagggaacccaggaagctgacaagctggcaaaaagggtaaaaacttcttacccgacaggcttccagcctctctttctgtgcaatttagttgagcagacgataaaagatcagttctgtctcaaaggattttgtttttcttttctataaaggcaaagggctagtgggagatcctcagtgtcctcagtatcactggggactcctgcaatgctacccacaggagagcccctccacccttgtgggccctaaaactaacatagggagctgctgaaagattgtaccatggcacatatgtgaggttttcttcaaaacagattgtgttgcaggaactgaaacaccaccaaaaacaatcccattaaatgtgggcaaaggggccgggcctggtggctcacacctgtaagcccagcactttgggaggccaaggcaggtgactcacgaggtcaggagttcaagactagcctggccaacatggtgaaaccctgtctctactaaaaatacaaaaaaattagccgggcatggtggcgggtccttgtaatcccagctacttgagaggctgaggcagggaattgcttgaacccaggaggtggaggttgcagtgagtcgagatcgtgccactgcactccagcctgggcgacagagcaagactccgtctcaaaaaaaaaaaaaaaaaaaaaaaaagtgggcaaaggacatgaaccaacatctctctaaagatgacatacaaatgaccaacacgtatatgaaaaaatgctcagaatcacaaattatcagagaaatacaaataaaaaacaatgcaatatcacttcacccaagttagaatggctgttattaaaaggacaaaaaccaacagacgctagtgaggatatggagaaaaatgaactcttagatactattggtgggaatgtaaattagcacagtcactatggaaaacagtatggacatttctcagaaaactaaaactaaaactatcatacaatccagcaatcccagtaccggttatctatccgaaaaggaggaagtcagtctatcaaagggattcctgcacttgtatgtttatcacagcactgttcacaatagccaagatactcattcaacctaagtgtccatcagtgggtgaatggataaagaaaatgtggtacatatacacaatggaatactatccctatattattactataaaaaagagtgaaatcatgtcttttgcagcaacatgaatggaactggagaaaattatgttatttgaaataacccaggcatagaaagacaaataccacatgcactcaatcatgtgtgggagctagaaaagttgacctcataaaggtagagagtagaaggatagacactacaggctgggaagggtgtgggtggggggagatgaagagagggaggttaacgcatgaaagcctacagttagataaaaggcataagttccatcattcgatagcagaatagagtgaccataactaacaaccaaacattgtgtatttcaaagtagctggaagggaggacttgaattgttcccaatgcatagaaatgataaatactccaagcgatggacccttcaaataccctgaccttatcattacacattctatgcctgtaacaaaatacctcatgtactccataaacatggaaaatattatgtatcaattaaaaaaaactattcctagaatgatggtaaaaggagaacattagacaatttctgttcaatgaggatagtccaaatttgagtaaaagtttcaaaaaaatattaatttaaggagaaaaattggtagaacacctgatgaagataaagatggacaatgtgaggtctaaatatccacaagaagtcagaaagttaagcagaaaaaaaaaagaagacaattactttctacagaaaaagaaaaaaggctgtacaagaaggtaggaaaggtaattacagtgtactatatatcccatctgtgaataacatttatacctttatgagtatatcaacaacagaagatttgtgatttgtgatttatgatttgtgattatatcaacaaccaaagttttgcagaactctattgggatgatgggtaacgtggcatacgagcagacagataactaaatcttccacttcatctgcaatattggaaagtcaacagatagtgcctaaaataaaaattttgtttgtagaggcagggtctcactatgttgcccaagatggtctcaaacttttggcctcaagagatcctcctgcctcagcctcccaaagcactgggattactggtgagtgccaccttgcccagccccagccttgtttttttgtttttttttttgtttttttttttttactctggtaaaatatacatagcatgaagttaaatcattttaactttaagtgtaaagttcagtggcattaagtaaattctcaatgttgtgccaccatcaccactatcgatgtccaaaactttttcatcatttcaaacaaaaattctgtacccatcaagaaataactccccaggctctgccctgcccccttgtaacctctcttctacttttgttttatagagttagttgcttattctgggtaactcatataagtgaaaccataccacatttgtccttttgcgtctggcttatttcacttcgttttatttcttaagtgtcagccatgtcacacatatagaaaaagttcatctttttcgccaaattatattaatatatcacatgtattcatttatgtgctgacggacacttaggacatttccatggactcacataatttgatgcaagtagaaacatttataattaacacaatattttatgaaaggctcatatgtaataagtactattaactgagtgcccactttgcagaacctgtgtgaggggctttatataaactgaagcacaacgagcttgggaggtgggaattgctgtcagtttcacagatgagcaagctgagtttctgtgtcttcagagctgaaagtgcctcacccaagtgtgcagtccagagcctgtgctccttccactgcacgcccaggtgtcgctcatgaacacagacacagggagaaacacacacacgaacccagatgtctacccagaaatatcttcgtgaagggacaataaacgcacaggcaaacattcagacaaactcacttagcaaatgtttgttgagcctggactcggtggcagattctgatctaggggatgccaggtgcagatacatttgccaagacacagggtcatgccccaggggctcctgggcacacatgcacacacagacctgcgcgctcacaccacagtgctcagcccgttcccaatcccaggacactccagggaggacagagactgtcacgccaacacccaacccctcccactgcaggctgagctgagttcctgatatgctgccagcccaacagcatagccaagggccctgggtctctctgcagacctgccctgaccccacttatgtgcatacacagacacacagacacacacagacacacacagacacagacacacacacacacacacacacacacacacacgaaggtgtgtgtcagttgtccagatacacataaagctcatccatggccaagtccctgcctctgcctgctgggaccagactccactgtcatgaggatgacacccaccgcctgtgctcttctgctggctctaatctgcagcgtccagctgggtgagaaagaagcgggcagggctgagaggaaacaggtggccctgctccttcaccgtcattgccatcccagggtctcagctgtcactattgcagacatttgccaggggaggtttcagtgaattctgacctctgctgctttcttatcttgcctcatccaccacaggggatgcctgcctggatttctataagttgtttgggagagttgcttttgcatacccagaggacctgaagcgggagcttgctcaatacaaccccagccccctgacagaggagtccttcctcaagttctagcaatgctttgcctctgtttcattcccagaaagccttgctgttgttggaatatggtaagtgtgccctggggaacctgcacatgctgcacagccacaagtcccaggccttatgccctgcacttaccttcccttcctgcttgccatatcctgagcaggaagccacatcccaggatgctcatgatcagatgaaggtgcccacaggcctcaacagggcctcctgcctcacctttttcagccctgaacccagacactgcaaccctgcaaggggagaacctctgcccctggtgcccgggagaggcccagggacacagggaaccacaatcactacatcaatgcactgatgatgagcacacagcaacacacactcacacaggatgctgttaacagcaacacacacactccatgcctgcacaggcacatgcatacacgtgtgttacaccaacacatgcagagtcacactcaagcaggagtcacaacccacactcactgtgtttgtccagagcctgggatccccaagaaatggacagaccttaaggagctcctctgacctctgggactgggtgttaatgatgggtctggggatgctttcacagaggctcccaggtccccactttatttctttcccaacagtctaggatcgttgtcagcgatgactgcaaagatgtgtagatacttccttctgatctgaggacccctgcaacccacctggccctcccttcctcagggctccccacactcctggcctgactctatccatcaacaaacaatccccagtaaacacctgcagctcagctctgtattctggcgtctctgtggggttggctgtgaccacatatgcagtgtgtgaccagggtctgcctgcgaaattacgtgactgaggaagaactcaacaggaatgtgtacacatgtgtgttttctgagcccaggaaatcaaccctaacacaatcctccatctcctcctacccaagtcctccttctctctacccccagcacaaccccaccccgccttgacccaaccccccaggactccagatgctggaggctgggaaaccttgccctcctggctgagtcacaggcctcagcgtccccataaatacctgcagctcagctctgctcctcgggctgttgggaccaggcaatctgcatgaagccatgggggtctctgtggccatgtgaccatgacaggggacactgaggtcacagggaacgagcaccactctcaggcatggtgcctctgtcccacctcacccttcagttgatttcgtcctcgctggaggtctcagtggccttcaatgcattgacaaggctccaccaactccctctggggaaggtccctccccaaacctcaggccctttctgcaggctccttggatctcctgggcaatggccacctgtgcccatcagcccacactgccctaaactcctctgtctccctcccagactctcactgccccaaatatcctttctcctctccactcattctttttgttacctctcagctgtcatttcctcccgggtcagacatttctggcccccatctcaggccacgtcttctcgcctttgtccccagaattgccttcacttaacacactgtctgccccagtcatcacccatgcactcagccagggaaggagtgtctcctgccacaggtcaggccttttcccagagccggacaccccatgaagaacaaggcagatgagggcgctgcttccctgaagttcacatccaaggtgaagagggggttgtaaagctgaagaaaattgtaatagtgatgagaaccacaaggaccacccaacagggaaatgtgatcgggtgggactggcttggggtgccacattgggtcaggtggtcccagaaggcacgtgaggagacatctcccgagtcctgaataacctgaggcagccaccaggtgaaggtctggggcagagaatgcagcatgatgagaaagggtttagtgtgtcggagaaatggccagtgtacctggaacaaggggcagtggggaagggggtcacgttgggctggagcagctgggtggatgcgatgccactcctgagaggtgaagcctggggagaagcaggtttagggcaaagatccggaatcccacactggcctggataagtttccaatcaagatatccattagccatccaggaggatgagacacagaaactgtgagacacgctagtttggagctcatgggagactcaggcctggagacaaaaatatatgctttcaacatgtaggtggaatttaaatccatggagataaagacaagaataaatctcatgttatttaattcagacacacataacattcagcttttaacgatcaaaggccacgagtttcaactataagttaatgaaaacagttaaaaatgtcctgagaaattttggacaaagaagctgttgatgtaagttctctgaggatgcaaaagcatttcacatgtgtttgaaagaataaggaaaatgttagagaatatttgtctggttaccatgagtctacccataatctgtaagttgtcatgaaattgaataatttcttaaaattacaatgtcctttaatcaaaacatatttattgccaagctatgctttttaaattaattttgttcatatttatctagatggcaaatccacagaatatattatgttaaattatgatctttgtattaacgttaaaattttgtgatgtgtctttttccttttttccacagttttaatatattactctttaatatttttaaacttcatacttttttggttattaaaatgaattttttaaatgcaaaaagaacatgttgcattatttattttagaaattcccctctttgtgttggactgcaaattcagtttctctttggattgttcttttttattttatgatttattttatttatttatttatttattttgagacggagtcttgctttgtcgcccaggctggagtgcagtggtgcgatctcaactcactgcaacctccggctcccgggttcaagcgattctcctgcctcagcctcccaagtagctgggattacaggcatgtgccaccacacccagctgattttttgtatctttctttagtagagacagggtttcaccatgttggccaggctggtcttgaactcctgacctcgtgatccgcccacctcggcctcccaaagtgctgggattacagacgtgagccactgtgcccagcctggatctttcacaactaggactgacactgtatgtaaaagttccggaacagtacagaaggtaaacagtttttatgtataacttcaaaaagggaaggaaaaaagagagaaatcctttgacttccacgtgcccatctcaagacattccactcacagatttgaggctctgggttctgggtttggagtttcagtgttaacctgaacagaactgacacacacacataaagatgagtgtaatgtgtaattattattcctcttgctggtcaccaccatcactttcgatttctctttttttgtgtgaatttacttaaaagaaaaaaaaactttttgcaataactatttggagtttaaaaatcaataaaccggccaggtgtggttgcttatgcttgtaatcccagcactttgggaggcagagatgggtgaatcatttgaggtcaggagttcgagaccagcctgaccaacatggtgaaaccccgtctccactaaaaataccaaaaaaattttagctgggtgtggtggcaggtgcttgtaacctccgctactcgggaggctgaagcaggagaatcacttgaacctaggagctgaacaggcagacccagcctgatgcccttgggacctgatcccactgccctcttcctgtgcaccccagctttccactctgttgtgccccaatctgtcaagtttctttttgtctctgatctctgctagggtgattccaatgcctgaccatctgttcttcttcttcaagtcaagggtgaaccctcagccccaccatttcctcttcctccactcctaagtcatcccctaagtgtcctgagggcaataaccggggcgtaaatgccctatgtgtctccagcatgggctctgcatgacttcactagacactgagtcacactggttgaggtcagaggacagaaaatctagcgagagagggactggagcaagaggtggagcgtctgacccttgtggggtggttcagctgctggggctgagcataccggagacctggaaactcaccaggcctgacatttacctttctgctttaatcccaagaaacctatggagattggggatcttccagccgagccaacggcaaagatgaggatttcctggtgccccttggccaaacctcctgctcacctggctgagcctgactcataccagtatgtggacctgtggtgtgggtggcagccacatcactgcggaattgggcttcatccagggttgattttccatggttagatttttcctcataacagtagaggctgttatgaacaatatgacaacaaattagaacacctagcaaaaatgtataaattcctggaaaaatataacctaccgggattgagccgaaaagaaatcaaactcctgaacagaccaattacaagtcagaaattaaatctgtaataaaatatctcctatcacagaaaagtctagattccaatggcttcattgcagaactcaaccaaacgtttaggaagaaataacagcaattcttcctaaactcttcctgaaaattgaagagtacggaattcttccaaattcattttacaagaccaacattatcctgataccaaaaccagagaagcacacacaacaacagaaaactataggccaatatccatgataaacacagatgcaaacattctccacaaaatactagccaaccaaattcagcagtacattaaagtaatcattccccatgaccaagtgggattcaacccagggatgcaagaatgtttccagatacacaaatcaataaaagcaacacactacaccaacagaatgagtacaagaagcatatgatcatctcattaggtgtggaaaaagcatgataaaattcaatagtccttaatggtaaaaactcttaacaaactgtgtatagaaggaatgtagcccaacacagtaaatcaatgtatggcaaacccacagccaacatcatagtgaatagggagaagtacaaagctcttcctctgagatctggaacaaggcaagaatgtccactttcaccacttttattcaatatagtactggaagtcctagccagagtgattaggcaagaagaaataaagggcatccagactggaaagaaggatgtcaaattgtctctgcttgcagaggacacgatcttatgtacagaaaacccctaaagcaccaccaaaaatctcttagaaagaaaacccctaaagcaccaccaaaaaaactcttagaactgatcaacgaattcattaaagatgaaggatacaaaatcaacgtattaaaagcagtaccattcctggacatcaacaacaaattagaaaagaaatcgagaaagcaatcttatatgaaatagctattaaaaaaagaaatgcttcagaataaatttaacaaagaaggtagaagacctctaccaaaacaactataaaatactgaggaaatcaattgaagaagacaccaaaaaatgaaaacatatcccatgttcataattagaaggatcactattgtgaaaatgaccatgttaccaaaagtgatctgcagattcaatgaaattcctatcaaaatatcaatgatatcttcacagaaatagaaaaaataatcctaaaatttatatgaaactacaaaagactctgagtggccaaagcaatcctgagcaaacaaaacaaagctgaaagcatggcataacttgacttcaaaatagactacaaagctatagtaaacaaaacagcatggtacttgcataaaaacagacacatagaccagtgaaactaaatagataactcagaaacacatccagctgtttacaaccaagtgattttcaacaaaggcaccaagaacatttactggtgaatggacagtctcttcagtcaatggtgcctgaaaaactggatatccgtatgccaaaaaaaatgaaactagacccctatctctcattatattgataaaatcaactcgaaatagtttacagacttaaaagctgaaactatgaaactgcttgaagaaaacataggggaaatactacaatactgatctgggcaaagagtgtatagtgaagaacccaaaagcacaggcaacaaaagcaaaaataggataactggattatattaaactaaaaagctattgcacagcaaatgaaacaatcaacagagagaagagacaacttgcagagaagagacaacttgcagaatggccaaaaaaattgtaaactattcattcaacaagggattaagatccagaatacacaagaaactcaaacaattcaatgtcaagaagaaaaactacaagtaatctgatgtaaaaatggataaattagctgaataaacatctctcataagatgacacatacatatggccaacaggtatttttagatgagatctggcacgttcagggtggtatggccatagacaccaacaggtatttttaaaatgctcaacatcactcatcatcaggaaaatgccaatcaaaaccacattcagatatcacctcaccccagttagaatggctactatgaaaaagacaaaagataccaaacgctggtgaggaagcaaagaagagggaactctggtgtgctgttggtgggaatgtaaattagaacagttattatgaaaaacagtatgagggttcctcaaaaactaaaaatagatttaccatatgatcaagaatcccattactgggtacacatccaggcaaaaggaaatcagtatatcaaagagatatctgcactctcatgtttattgcagcactgttcacaatggacaaaacatggaatcgacttaagtgtccatgaacacgtgaacagatgaaaaaaaatgtggtatacatacacaatgaaataggatttagctatgaaaaagaataaaatgctgtcatttgcagcaacatggatgagcttggagtcattgttttaagcaaaagaagccaggtacagaaggatgaatcctatgtgttctcactcacatgtggaagtaaaaaagctgctctcatagaagaagagtgtagaataatggttacttgaggcaggaagtagttgggggaggtgggactatagccaaaagttgatggatggatacaaaagtgcagctagataggaagactaacttctagtgttctataggattgtagggtgagtgtaatatacaatttattgtatattttcaaatacctagaagagcagatactgcatgttcccaatacgaagtaatgatcaatgtttgaggaggtgtatatgctaatcaccctgctttggtcattacacattgtatgcatgtattgaaataccactgtaacccataaatatatacaattattactgcatccatttaaaataataataaaagcaaaagaagaaaagaaaaaaagctacagtctaatatccacaattaaatcttcaataacatagtagaaaaccaagttcaacacacattaacagaattatacaatatgaccaagtagactttatccctgaaataaaagaatagttcaacacatgccaatgaatcaatatgacattccacattaacaaaataaagaataaaaaccacaggatcaccttaaaagatgcagagaaagcacttgataatattcaatatccattcatactgaaaccatcaccaaaatagatactgaaggaacttacctcaacacaaatatggtaatatataaaaacccactgctaacatcataatcaataaagagaaattgaaatcatttcctctaagatcaggaacaagatgaggatgcctactcgtaccactcgtatttaacatggtactggaagtcccacccagagcaacgaggcaagaaaaaaaaagccatctaaatcagaaaaaaaagaagtaaaactttatctcttagaagatcacatgatgttggttgtgagatgtgttcattattttgattattatggtagttgttctgatttttacaagtgtcaaaagttacaaattatatactttagacaaacatacttgttatatgtaaaatatatttcaataaagctattaaaacaaaaaaattaatttaataaacatatacaagattttaaaataaaattagaatcaacttaataggttaatgaagagagaaacatcaaaaagaaacatttagttaatactttaaatgatactatttaaagctcaacttccccaaaactcaactgtttatgtaaagctaatgagagaccatcaggctaggatagaggagccttaatttggccaaagtacaaacaaaagttacaaattatacactttagataaacatacttgttacaggtcaattatatgttaataaagctattaaaacaaaaaattaaatttaacaaacatattaaataattgccagcaattattctggcagtcacacagatatgcaacttctccagttacttctgcagataccatcactattttagaacctgagattggccttttgagaagtcttttcaggtttttttgtatgtctaacaccaatggctccacctagattcaccagctgttcctgtggccccacccagaaggaactgcatgcaaaaagacagcttcaactctctatgaattcatctccaatccaagaaatcagcactccacataccctagcccccagcccaccaagagtctttgaaaaacccctagcctctgggccttcaatgagatcactttgatgttaactctgtttcccccatggcatggccagcctcccatcaattaaaccctctgcaatgccacggtctccctgaattgatttgtttgtgcagcaggcaggaagaatccttcgggcacttacaccactccaatcttatgtaaattcttccaaagaataaacaatgagggtacattctctgtaccaatcagtgtccctgcaggaaggaaatggcacactcatgcaggacataggacaagagtttaatgaatggctgtaaacaaaaaataaaattctaaggcccccaaccatctgaatggacccctcctcttggccaatggcattccaaagttaacctgaaaaactagttcaggtgaagatggaaggaggagtcagacctgcctcattatacccaattcccttttggaattcaggaaaagctgaccaaggtttaacatcaacacagaccttaagtctgataagaaacatttacaaatctattcgttctgaagcctgctacctggaggcttaatctgcaggataaaaccttggtctccacaaacccttaccacaacccaggcattcctttttattgacaataactctttgaaccaattgccaatcagaaaaattttaaaactacctaagacctggatgcccccccaaccccacttcaagttgtcctcttgcccttccagatggaaccaatgtaaatcttacacgcactgattgatgtattatgtctccctaaagtgtgtaagagcaagctgtactctgaccaccttgggcacatgtcatcaggacctcctgaatctatgtcatgggcagatccttagccttcgaaaaatattttctaagttgattgagacctctctcagataccttctggttcacaggcttatggctgtgctgtgagcaaagttaagggaaaccaataagaaaagtgagaaacccaaggcaagcaagagcaacatatctaacgagaggcaaggaaaaggagccatttctacaatccagtaagacatgtaactgcaggagaggccaaggtcacaggaggaatgcagccactgccaaactgtagccctgaaaaaaaccaaagggcaacattgcccaacaatgcaatccagaaaagatcaggtcctggggtacaaagcaggctatggaatgaagactaaccctgttggaataaatatacatcacctctacatcccccaattcataatgagctggtatcatgttgacaccaaaatccaaccactcaaggacatagacaaaatgttctatgcaagatattggcaaagtgaatgaaattacatataaagaaaactatatgctgattaaggaggatttacaccagcaacgcacggtaggtttcaaattacaaaattatttgatgtaatttaacacattcagagcctaagggaaaaaactgtatgcatatttcattaaatgcaagtgagatatgttataaaattcatcttttcttgatttaaaaaattcctttacagagggtgcagtggctcatgcctatagttccagcacgctgggaggccgaggtgggcagatcacttgagccaggagttcaagaccatgttgggcaatatggcaaaatgttgtctctacaaaaattacaaaaattagccagatgtggtggcacccacctaaaatcccagctactcgggaggctgaggtgggaggatcgcttaagcccaggaggatgaggctgcagtgagccatgactgcaccactgcacttcagcccaggtaacaaagcacaaccttgtctcaaagaaaatttaaaaattctcttagaaaatagaagtagcataatatatcttaatctaatgaagaccacctacgaaaaaaatctgatgttaaacttcttatgtaatggtgaaatatcaaaagctatcctttagaatctgaacgaagggtaaccagaaatacttttaaaatgttgtataactttcttataagcctaaaattatgtgaaatttaacaatttatgtaagataaaatgctatcaagagcaaaagaaagaaacaagcaaaaaagaaattcatcttgagttcagatactaaacaaaaatgcctactttcaccattgctatctaacattgtactagagattctacaagtggaataaagcaagacaagtaaaatatatgaagattgaggaggaaaaagcaaatatgcattagatatatttatataaataatcttagagcatctacagagaatatattaaagagtttttgaatgctgaatacgaaacaatatagaataattatacttttctatatggcagcacgaacatttataaactgacactttaagagaatgcaatatttacagtggcattaaaaagaacagataccttggaataaatcaattaatacatgtataagagcaccatagaaatacatatgtattaccaacattaaccttaaatgtaaatgggctaaatgctccaattaaaacatagactggcaaattggataaagagtcaagacccatcagtgtgctgtattcaggagacccatctcatgtgaaaagatgcacataggctcaaaataaagggatggaggaagatctaccaagcaaatggaaagcaaaaaaaagcaggggttgcaatcctagtctctgataaaacacactttaaaccaacaaagatcaaaagagacaaagaaggccactacataatggtaaagggatcaattcaacaagaagagctaactatcctaaatatatatgcacccaatgcaggagcacccagactcataaagcaagtccttagagacctacaaagagacttagactcccacaccataataatgggagactttaacaccccactgtcagtattagatcaatggagagaagattaacaaggatatccaggacttgaactcagctctgcaccaagcggacctaatagacatctacagaaatctacactccaaatcaacagaatatacattcttctcagcaccacatcgcacttattctaaaattgaccacataattggaagcaaaacactcctcagcaaaggtaaaagaacagaaatcacaacaaactgtctctcagaccaaagtgcaatcaaattagaactcaggattaagaaactcactcaaaactgcacaaatacatggaaactgaacaacctgctactgaatgactactgggtaaataacaaaattaaggcaaaaataaagatcttctttgaaaccaatgagaacaaagagacaacataccagaatctctgggacacatttaaagcagtgtgtagagggaaatttatagcactaaatgcccacaagagaaaggaggagagatctaaaatcgacaccctaacatcacaattaaaagaacgagagattcaagagcaaacaaattcaaagactagcagaatgcaagaaataactaagatcagagcagaactgaaggagatagagatacaaaaaaacccttcaaaaaaaatcaatgaatccaggagctggttttttgacaagatcaacaaaatagatagactgctagcaagactaataaacaagaaaagagagaagaatcaaatagatgcaataaaaaaatgataaaggggatatcaccactgatcccacagaaatataaactaccatcagagaacactataaacacctctacacaaataaactagtaaatctagaagaaatggataaattcctggacacatacgctctcccaagactaaaccaggaagaagttgaatctctgaatagaccaataacaggttctgaaattgaggcaataattaatagtctgccaaccaaaaaaagtccaggatcagatggattcacagccgaattctaccagaggtacaaagaggagctggtaccattccttctgaaactattccaatcaacagaaaaagagggaatcctccctaactcagtttatgaggccagcatcatcctgataccaaagcctggcagagacacaacaacaacaacaacaacaacaaaaaaaaaaaaaaaaaaaaaagagagagaattttaggccaatatccctgatgaacatccatgcgaaaatcctcaataaaatactggcaaaccgaatccagcagcacatcaaaaaagcttatccaccatgatcaagttggcttcatccctgggatgcaaggctggttcaacatacacaaatcaataaacgtaatccatcacataaacagaaccaatgacaaaaaccacatgattatctcaatggatgcagaaaaggccttcgatgaaattcatcagcctttcatcctaaaaactctcaataaactaggtattgatgggacgtatctcaaaatgataagagctacttatgataaacccacagccagtatcatactgaatgggcaaaaactggaagcattccctttgaaaaccagcacaagagaaggatgccctctctcaccactcctattcaacacagtgttggaagttctggccagggcaataaggcaagagaaagaaagaaagggtattcaattaggaaaagaggagtcaaattgtccctgtttgcagatgacatgattttatatttagaaaacctcatcgtttcagccaaaatctccttaagctgataagcaacttcagcaaagtctcaggatacaaaatcagtgtgcaaaaatcacaagcattcctatacaccaataatagacaaacggagagccaaatcatgagtgagctcccattcacaattactacaaagagaataaaatacctaggaatccaacttacaagggatgtgaaggatgtcttcaaggagaactacaaagcactgctcagtgaaataaaagaggacacaaacaaatggaagaacattccatgctcatgggtaggaagaatcaatatcgtgaaaatggccatactgcccaaggtaatttatagattcaatgctatccccatcaaactaccaatgactttcttcacagaattggaaaaaactactttaaagttcatatggaacaaaaaaagagcctgcatagccaggaaaatcctaaataaaaagaacaaagatggaggcatcatgctacctgactttatactacaatgctacagtaaccaaaatagcatggtactggtagcaaaacagatatatagaccaatggaacagaacagagccctcagaaataacaccacatgtctacaaccatctgatctttgacaaacctgacaaaaacaagcaacagggaaaggattccctatttaataaatggtgctgggaaaactggctagccatatgtagaaagctcaaactggatcccttccttacaccttatacaaaaattaactcaagatggattaaagacttaaatgtaagacctaacaccataaaaaccctagaagaaaacctaggcaataccattcaggacctaggcatgggcaaagactttatgactgaaacaccaaaagcaatggcaacaaaagccaaaatagacaaatgggatctaattgaactaaagagcttctgcacagcaaaagaaactatcatcagagtgaacaagcaacctacagaattggagaaaattttcgtaatctacccatctgacaaagggctaatatccagaatctacaaagaacttaaacaaatttacaagaaaaaagcaaacaaccccatcaaaaagtgggcaaaggatatgaccagacacttctcaaaagaagacatttatgcagccaacagatatatgaaaaaatgctcatcatcactggtcatcagagaaatgcaaatcaaaaccacagtgagataccagttagaatggcgatcattaaaaatcaggaaacaacagatgttggagaggatgtggagaaataggaatgcttttacattgttggttgaagagtaaattagttcaaccattgtggaagacagtgtggcgattcctcaaggatctagaactagaaataccatttgacccagcgatccctttactgggtatatacccaaagaattataaatcactctactataaagacacatgtacacatatgtttattgcagcactattcacaatagcaaagacttggaaccaacccaaatgtccatcaatgatagaatggattaagaaaatgtggcacatatacaccatggaatactatgcagccataagaatggatgagtgcatgtcctttgcagggacatggatgaagctggaaaccatcattctcagcaaattatcacaaggacagaaagccaaacaccacatattctcactcataggtgggagttgaacaatgagaacacatggacacagggcagggaatatcacatgtcggggcctgtcgggggtggggggctggggtagggataccattaggagaaatacttaatgtaggcgatgagttgatgggtgcagtaaaccaacatggcacatgtatacctatgtaacaaacctgcatgttatgcacatgtaccctagaactcaaagtataataaaaaaataaataaataaacgtgcaatgacattaaaaaaaagaaatacatatgtaaaaaattattgtgataaaataagggagaccaaaataaatggcaacatgtaccagtgttatggagaggaatattcaatattatcaaaatttcagttctctccaaattgaattcaaaaagctgtttctaaacatctggcactgtagagggccaaaaccagcaaagacattctaggaacaaggccaaagtagaaggactccctctgccagagtcaagaactaagtaaagctttagtgtgtactcaacgcagtgccacactggcatagagacagacaaagagaccagcgacatgaaatagggaacccagaagcaaactatgtccctctatggggcacttggttgttgacaaaagggacactgagaataatggaataagggccatcttctcttaaaccaagcttgtccaacctgcggcctgcaggccccatgcagcccaggacagctttgaatgtggcccaacacaaatttgtaaactttttaaaaacattatgagtttttctgtgatttttttttttagctcattagctattgttagtgttagtgtatttttttttaatttaatttaatttttttgagatggagtcttgctctgtcaccaggctggagtgcagtggcctgatctcggctcatcgtaacctctgcctcccaggttcaagcaattctcctgcctcagcctcccaagtagctaggactacatgtgtgtgccaccactccaagctaatttttttgtatttttagtggagaggagctttcaccatgttggccagaatggtcttaatctcttgatctcgtaatccacctgccttggcctcccaaagtgctgggattacaggtgtgagccaccgcgccgggccatgttagtgtattttatgtgtgacccaaaacaattcttcttctttcagtgtggcccgtggaagccaaaagattacacaaccctgtcctaaactgggacagcagggaatctatataattaaaaagaaagggagttcttacccacacttcacgtaaaagtccattccatgtactttagagacctcaatgggcaatccaaaacaataaagactttacaaatctttatgtagaagaatatctttatgaccatgacatgagaatcttttttccaaaggaataaaaccatattaaaaataacaataaagagataaaaatgttttttaaacaacacacacacacacacacacacacaacatgaagcataaagtataacattgataaatttaattatattaaactttaaacttctgctcattaaaaaccataaggaaaatacaaagctgatccacagtgttggggaacacatttcccacaaataaccaaacaagggctcttatcaagaaaatataaagaactcctttagcacattgggaggccaaggcacaggagttcaagaccagcctgggcaacatggtgaaatccgtctctactgaaaatacaaaaattagccaggcacagtggtatgtgcctgtagttccagctactcaggaggctgaaacaggaggatcgcttgagctcaggaggttgaggctgcagtgaaccgagatcatgccactgtactttagcctgggcggctgagagagaccctgtctccaaaaaaacaaacaaacaaacaaacaaacaaaaaaaaacaataaaagtgcggaaaaagccttctactcacatttcactaaatgactgataaacatatgaagaggcctcaacctcattacaccacaaaatgcaaatggaaacccaatgagatgccgacgcccctgacacctgcctaccagatggttcacacgacactgacaatgccaccttgtggcgatctagagcagtaggaaatactacagtgtggctgggggtgtgcattgtacaactgcttcaaaggtttcctgtttcctagaacagtcaagaatatgaatatcttatcacctaaaattccacacatgggcacaaaccctaacaaatgtgaatgtaaatgtgtgccaggacatccacacataaaagctccctatagtgttgttcatgataatagaatcagtacacaatggcagattttttaaaccataaagacagcaatgtggattgatagcaacagcaatgttgaacaaaaaagtaagatacaggagaacacacacgatgactacggccataaaaattataaaaagccaaaattaatgtttactgtatgtgcagatgttcaggtagcaaaaccatccactaaaataacagaaaaccacaaagtcaggacaggggtcaactctaggcagtgaggctggtgccgggaggagctcaccatgacctttcttcaactgcaggggtattgtgaggtttgcatcacagacatcacttaagatacagtttatatggtgtgtcctagtctgtatttgtgtcatatgtcacaatagaaagatgagaggccatgggaggagggaaagggagaaagggaaagtgaaggggaggataaatgaataaagaaaaagagacaagaagatggagatgcagaggggaaagagagaaagaacagggcagggaggaagagacaggagaggactggggggaagagacaatggggagaaggagggagtgtgagctgcacccgtgtaacctgcctgccccagctcctccacagccgggttgtcctccccgcccaccccacccctcccccatgggacacctctgctaagggactactccccactcagcacgctgttgacctccagcccctatccagaaagtctcatctcccaaaaccctgcccacaaccctaaggtgaacccacagttgagggagctcctcccctagtgtcaacctggctcccacctcccagtgcgggagaaaagcaaagcagttgagctgggaggctttggggacaggccattctccaggagccagcctggccacagggccaacggtccctggcagagaacgacagggctcaataagcagaggccatgcaggccccaaggccagactacagtgggagccagtgtggccaggtgcccagaaatcccaacagcaccactgggtcccttagaagatgctcaagttcccaaaactgggggttagaggcaggggattagtcagacctcaccttggacagcagccccagccctgcccagggacaccagggcatgagggtgtcacaagcaagtaggtggctcaaggccaggtgcctgtgccttggctgagggacgtggctcaggtcagtttgctccatgactccctgggtcccacagaccccactccacgctctactgcagcccagtgcactgcatggtgctctgctgtgccaggttgtgttgtgtccagttgtgctgtgttgtgtgctgtgtcactgttccagcaaactccttgtccggaagctctagggccccggccactgagaagccctagccctgagtcagcctcaggcaaggcctgcatccctgctgcctccctttccctggctcagccttgcagctcccgctgacccctctgccactcacccacccatcacccccacttagaggccaggaagcagcgggagctgtatctccctcccaaccaccccctcccctctttcttcatcctccaggacatgcatttctaacagaaaccagaaatcctgcaaatgccctgacccatccactgaccccagggcacctcctgcccaggtgtttggcacaggggacgcccccacaccggccccatcatgtacctggtggccccaaggctgcagcacgggatgcctttctgaccctggacctgccctgggccctgctctctgccaccgctcacaggacaaacccaaacaattgctgtcctccctctgaaatggtggccatgagagtgcaggccttgcgtccctcctgtgcccaggcccctcacccacacactctggctggctgcatctgttgtccagagcccttggtcacaaggcgtgcagcctggaccacagtgatgacaagggaggcccttcctaagcctagagatggtctaaaccttcatggaactgctggtcccagtgccagccagagtcccaagtgaggctgaggtggctcaaagtggtgcacgggagatgtctgatatcaaccctctcctggaggtagatgatgtctccagcctggtgactccctggccaccagccaccaccatcccccatgtccccaaggctgaaagtgcaagcttgccctggccctggcacagaaagtgcacgatctggtcatgtcatgcaggtgacctcatgcgggcatggtggcacttgtggggcagtcctgtaacctgcagtgtggtgggtgggatggatgtgtgtgacacaggcaggaactacccctcatggcagttgagggcccacgtgtgtattgggtggggctgatgggagtgagaggtgagtggctgggcacaggcaggtgagtgagtgacagctacacaaaccccaccactgagcatgtccctcccaggacaaagcaggtcagagccacaggcccagccctgggaggcccagaggggcctcaggtcctcagggacctggccctcttggccctcagaggaccccactccctctagaaagccccccagctggctccacctgtagctgtgcaagtgggaaggggacacagtgctctggggtccagagaaggaaggaagatggagggagggcggccctctgctcccaggtcctctgttccctgaccctgatgctcagccccctgcggccctcctggagcccacacctttcagctgcagtctcccagcctctctccccaggacgaagcccactcagccagtgcttttccactgtagctggcttttccccttggggagggtccccagattgtacaaagtgcagaggggtcccctgtccctgtcccacagggtccccacaccaggctttctcaatgtctccctgtctctctcagacaaggagggcagaggcagccacaaggccggtcccagccacaatcacacccgcatattcagataatcacagacgcttgtcccacacagtcacacaccccaacctcaggtaccaaacaccccacacactcccgacagcgcattctactcacacacacacaatcccattctcacacatgtgcacccaagcctctcgccccacatacaatgtgacaggccactgggccacctgcgggtcccagtgcacatggatgcctgcagtgcacagccacctagatcctgcaccaccggacaggaagggggcgggtacctggcagatgccacctgctgcgcccactgggccaccagaaactccacctctccccgactctccaggtcccagccaagccacgcccaccgggcctgcccccaggaccctgagtttaaagaccccatctccccaaatgccagagggagaggattccgcaccaccccaagtgtaacccacaccctagtcggccctgaccccgcactgcatggcgcccacctgagccctggcgttgctgggcctcctgctgctgctgttgctcgtgggtaggccctgccaggagaccctgggctgcgctgcagccctggggtacccacccctccctgctcacgtgctcctactctccctgcagatcccaagaaactatgcccgcagctcgtgaccgtcatgaaccagtttctgaccgaggacaaggacacctacatggattctgtcaacagatatcatcccacggagctggaaagaaacacaccctccaaactcaaggacatggtgaccaacaccacgacccccgaggagggacaggccgtcatgcagcaggcccggccaccagcgcctcctcacagcccttgacctcctttgagatcagggactctgttccctgagagcctctctctccacccaaacacttccccacctctcaccaagcaatgtccctgcagacgggcagctgcccagggaaaagacctcagggcgctgggtctccgccctctgatactcaacctctgctgtcaaccccatcctatccctccttcccagaagacccctcccttcagcctcccacccctccccacaggaagaaatcaacaaccagggtgcctacacggtactgaagtgacaccatccacaggcacctcgaatctctgcccaggcagcctgtccggcccaggagaacctgggcccggggccccaccctccccagctcctgccctgctgctgcccctcctcccactcctgctgtgctaattggggctgattgcgggccactactttatttacatagggtgtacaccaagtaaccaatgggaagcctctagagggtatttagaccccaggaaattctaaatgggctcttgagcccttatgcttgggcctgctcccggtttggagtgtactttcactttcagttaagtctctgcttttgttgcttaattctttctttgctttgtttgtgcgttttccccaattctttgttcaaaacagcaagaacctggagaccctcctcctgtaacgggaaggtgggatggggggagcccaccctgacactgacccgggccacccacgtgcccctccccccacacccatactcactagggccctgggtggagcttcccctgctgctcacagctcggtgagtggccaggccagcaagctcccccagctgcgcccctctgctgattttgcccctggtcacccttaccaatcagggtccagtcaggtgacagaagtcacaggcaagtggcttcaacacccacatatgtagtgagaggtgacagcatgctggcggccctcgcagccctcgctctctctcggcgcctcctctgcctgggctcccactttggcggcacttaaggggcccttcagcccagcgctgcactgtgggagcccctttctgggctggccaaggcgggagccggctccctcagcttgcagggaggtctggagggagaggcgcgagcgggaaccggggctgagcgtggcgcttgcgagccagctggagttcccggtgggcgtgggcttggcgggccccgcactccgagctgccggccggccctgcctgcccgggcagtgaggggcttagcacctgggccagcaactgctgtgctcaatttctcgccgggccttagctgccttccggcggggcagggctcggtacctgcagcctgccaggcctgagcctctccccctcctctgtgggctcctgtgcagcctccgagacgagcgccgccccctgctccatagcgcccagtcccatcgaccacccaagggctgaggagtgctggtgcacggcgcgggactggcaggcagctccacctgtggccccggtgcgggatccactgggtgaagccacctgggctcctgagtctggtggggacttggagaacctttatgtctagctaacggattgtaaatacaccagtcagcaccctgtgtctagctcagggtttgtgaatgcaccaatcgacactctgtatctagctactctggtggggacttggagaacctttgtgtccacactctgtatctagctaatctagtggggacgtggagaacctttgtgtctagctcagggattgtaaacgcaccaatcagcaccctgtggaaacagacggctcggctctctgtaaaatggaccaatcaccaggatgtgggtggggccagataagagagtaaaagcaggctgccccagccagcagtggcaaccagctggggtccccttccacactgtggaagctttgttcttttgctctttacaataaatcttgctactgctcactctttgggtccacactgcctttatgagctgtaacactcaccatgaaagtctgcagcttcactcctgaagccagcgagaccacgaacccaccaggaggaactaacaactccagacgcgccgccttaagaactgtaacactcactgcgagggtccgcgacttcattcttgaagtcagtgagaccaagaacccaccaattccagacacagtagcatctcttcactgtgtaacatgtgttcctaatgcactttctatatctcacttcctttaggttctgtgttttattccaggtaatgttccttgaatctaaattacaatttactaattttcacgaaagctgcacctaatctgctacccattcagacaaacaaactcatttatcaaatgtttgttgaaccggcactcggtggcagattctgtgctagggcgtgccaagtgcagacacatgtttgccaagacacaccgttatgcctcagggcctcctgggtgcacatgcacacatggacctgcaggctggcaccatagtgctcagcctgctcccaatcccacggtgctccagggaggacacaggatgtcacagcaacacccaacccatcccactgcatgctgagcttagttcctgatacactgtcaccccaaaggcatggcccagggccgtgggtctctctgcagacctgccctgcccccacttacacacacacacacacgaagaggtgtgtctcatttccacctgtgggattctaatttatggcagtgactgagtgaccacacagagaggccaatgcgatggaaaacattattatttacatttcccggggcacaccatgccacacagggccacatggagagcaccagtgctggtcaggaggcaggagcaaggggaacccataggccacagcctttattggggttcccatgggaaaagccaggcagggcagagtaaacagcttatgattagctagtttgaataatcccggcaggctttggcctatagtgttggtctctggttacctggtacctggtcatggggtgcttcagtgcaggggagatattggcgtggggtgtgagagttggataaagaggtaatcggggctatagattcagtgccagttggttgtatatgagacaggtgctccaggtcgagcgttttgccatctctaagaaaagactaatcctgggaggacagtctccagagccagcaaactttaaaagatgtcatcataaaatacagaaaataaaaagcataattacaccaagtcgcagagtaagtggatgtttaccttttcacaaactgactaactgtgttccaaagtggttatactactacattcttaccacagtgttatgaggatttcaggtactccatatcctcaccaacacttggtatggtcagtctttaattttcactattcccgtttggtgtgcagtggtatttctctgcgattttactttgtatctccctaataactaatgtttacaatttttatgtgtactactgccatccctctatcttctttggttaggtgtctattcaaatcttttgcccatttaaacttttttctttattattgagttttgagagttcttaataaataatgaatacaagtccttcttcagatatgtggtttgccagtatagtcttctagcctatggctcttttcttccttcatcttaaaagagcatgtcgcatagcagaaatgtttactgttgacaaagttgaatgtgttatttttttctttgattgaacatgtttttggtgtatatttcagaagtatttgccaagattttaaaaattctctcatgttacttaatgaaggtttcatatattcaggtttataatccatgctgagttagttcttgaatattgtataccgtgtgaggtttgggatcagaactttgtggctggtttgtttgttttgagatggagtctttctctgtcacccaggctggagtgcagtggtgcaatcttggctcacttcaacctccgcctcccgggttcaagcagttctctgcctcagcctcccaagtagctgggattacaggcaccacccctggctaagttttgtatttttagtagagatggggttttaacattttggccaggctggtcttgaactcctgacctcatgatacacccaccttggcctcccaaagtgctgggattaagggctgagctactgcagctggcctggtttttgttttaatatggatgtccagttgttccaacaacacttgttgaaaacacgatcttcagtgaattgcctttgcacctttctaaaacatcatttgatcttctaagtgttggtctatttctggactttcttaatctatatttttgctaacattttaaagtcttaattaactttataatatgtctttaaatcaggcaatgtaatcgtttaactttatgcatctttttcttttttttttgctattctaagtgctttgtattttcatatcaattttagaattcacttgttattttctaataaaagcatcgtgggattttgattggattgcattgaatatatgtttatcaatttgagaagaattagcacattaacaatattgagtgttctaatccataaacattgtgtatctctccttttatttagatctttaattttcctcagcaatcttttgtagttttcaatgtacatatcttgcacatcttatgtgtctcaagtatatgttgtatgctcttgtaaaaagtgcttttaaatttcagtttcaaattgatcattgtatacagaagtataatttttttaaaaaattattatttaccctgtaaattttataaattcatttattccagatttttttcacagattctatgggattttctccattaatatttatgttgtctaacttatttgttcaattttatgtgtttattttcaaactggcaactgtgaaatgtattggaagattattcataaaattccttattactgttttagaatctgtaaaagctggttgtggtggtgcactcccatattccaaactaccttggaggctgaagcgagtgaactgcttgagcccaggagttcaagacttcagtgagccatgatggggccaatgcactccaggtggggtgtaaaaataaataattaaatgaataaatgaataaataaataaataaactatgtagtatctagtgatgtcatctcatctgtaacttatcggtaatttgttttttctcacattttttttttttgctagatccacagagttatatcccttttattgatctcaaaaaatctgtattggttttactcgtttttctctattgctattctgttttccacatcattaatttctctctgatctttactatttccttcttgttttgagtttcaattgtcttttttcaagtttttaaggttgaatctgtcattgatttgagatagttctttcttgatacaggcatttaatctacaaatttagcagcatctacaatttattttgtatgttgtgctgtcgtgtaataagatagtggcctagtgtagctctagtcttatctgtggagattcctgggtatccatctttatcccttggtcaagataaattagtgggatttataatgagctcattaaaatctaaaattcctcatagtcccaagggccgatgtgtctaccaatggcttttgctgtggtctgaatatttgtatccccccaaaattcctatgttgaaacctaatcatcaatatgggactcatttgaacctaaacttccaccaaaacacaaacctgaaactttgtctcccttcatacacgacaccttcttccataacctcacatggcaaaaggagcaaacaagcttgggcctcttttataaggacatcaatccattcataagaactccagcctcataacttaacatttcctcaaaggcctcacctcttaatattgtcacactggggattcggtttcagcatatgaattctgtggcgggggcgggggacagacattcacatcatagcacaccctgaatcttaaacagcttctgcatcagagtaaactggcttttcttctccaaagttcatattctaaaatgtgcccttgaccagataaatcccaacagcaaaaattactgattgtaaacactgcattattttaaataggaaagggacagaaggcagctaagagctagtggaagggagtgggttgagtattgcatgtaatgtgttttagtttctccttattgctctctctctctgcttcattttctttctcaagtgtctggcatatttgtttaaatcagacttgcttatgcctatgattctctctacctcacacccctgatttctgttcctcagtctctattccagtgcctctaacctttctgctaacaatgcaagtcagggtgtcactggaaaaggggtctcgatccagaccccaagagggttcttggatcttgttcaggaaggaatttaagatgtgtcgcagagtgcagtgaaagatgcaagtttattagaagctacaccattagtgagcaggaggccctcagaaaacaagaggaggaatgcactggctttaagtttttcttatataggggtcttatctatgaaaaaactaagctaagctgggtctatgtgtgggtgagcaggcagaataaaaaaaattattacagtattcatttaaactaacctggacattccagtgtgtaagtacatcaaaacatagctattatcttcaaagcatatattgttacgggtattgggacatctggactctgcactgttgtaggagtgtccctgtaggtatctttaggctgtttcctcaactataaacaccccatgactatgggccatgaccgacaaggaatgtgctttgctagtctcaaaatggaactatacttaaaatggcatcctctggctctcttatactcctgcttccctaacgatggggcattcacaagttaggggtttaacttcacaggaatgctttttatgagatggccagacatagctattgaaacaaaaggactagccctccatttaaagttcttctcacctatgccctgagtcacatctagtcctttaatgttggccctctctccactcatgaacttaactcatattccaaatatctgaggactcataatgggaaaccaccataattcttccagtgagatcatgaggaaaagcagaaacaatgaaaaatccctatgtaagcttttctggatggactgagcagggactttatgtcttaagtgtggtttaaagtggttccaaagtggcagggatcctggtcttgtctgaaaggaaattatataatctctagaagagaaaggcactttcatctaaggatatgggaaagctacatgaaatctcttttcaaggacaaagataaccaacaaaaaaggaagcaaagcaaactgattgaagaatttggaaataaacatccaaacgggcccacaaaatcttcagttattgttattatcagatacatattatgaagcaactatacctaccatgttaaaaaagtttggaaaattgaaattaaaatgtcctggagagataattatgaatgggcaatagatcggaataaattatccagaatgcaacacagagattgaaggatgaaaatcacagagaatttaagacacctggaggatagaggggtaacacctgcctcataacgaattggggttctcaaagcagagaaacaatggtgaagaggcaatatatgggagaggaagagtttgctgattaccagagatgacacatcacagattcaagttgttcagcaaatcccaagcaggaaagaatttaagaatttcataaccagaaacattatgccaaactccagaaaacacattcagttactatttcagttgaaagcccaggattctaagtgggaaacgatcttaataacctagtcactgcactatctcactatctccttaaacctcattttttcctatgtctcttgcattttaatattaaaaaggtcatcattccaaaagaacttgaccaaaagacctgcaattctcagagaagggaatactaagaccaatagacattcaaaaagattctcaatctcattaacaattaaaaaatgcaactttaagccacagtgagttactatttcacacctagtagattattaaacttttaaagtttcacaaagagagtgttggcagtaagagttggcaagcaaaataaccataaactctggtaggagtgaaaattggtacaactttggaaaacaattcatgattgtatagtaaaatcatagatggaaacatgctttgcacaatccagtctttccttattacatactctaagccttgagaggaagccagctgatgccagtgttttttaaaactgtggctgctataggaattcacaaccacacccacaggatacaccaaggtagaactgtcagaggtgtttaaaccagagcgactccatcttgaatagggcctgggtaaaatgaggctgagacctacttcccagacacttaaggcattctaagtcacaggataacattggaagtcggcacaagctacaggtcaggtcataaaggccttgctggttaaacaaattgcagtaaagaagccagccaaaacccaccaaaatcaagatggcgaggagactgacctttggtgtcctcactgctgcttgttatgtgtccggaattggttccttctggtgggttcctggtctggctggcttcaggagtgaagctgcagaccctcgcggtgtgtgttacagctcataaaggcggtgcgtctggagtcgtgctggagttgtttgttcctcccggtgggttcatgatttcgctggcttcaggagtgaagctgcagaccttcacagtgagtgttacagctcctaaagacggcgtgtctggagttgttcgttcctcccagtgggtttgtggtctcgctggcttcaagagtgaagctgcagaccttcagggtgagtgttgcagctcataaaggtagtgcagacccaaagagcaaaagaacaaacatcccacacctgggaagtagaccccagcgcggttgccgctggttgttcgggtggcccgtttttattcccttatttggccccgcccacatcctgctgatttgtccattttacagagcgctgattggtctattttacagagtgctgtttggtccgtttttacagagtgctgactggtgcatttacaaacctttagctagacacagagcactgattggtgtatttacaatccttcagctatacagaaaagttctccaaggccccacctgatccagaagcccagctggcttcacctctcggttatatgctaattatatgcattagcacgctaagagaaacgctcatcagtgccatggcaatttacaaatgccatggtaaggttcagaagttaccctgtatggttcaaaaagctgggaagccctcagctccgagaaattgaaattgcccacctctttcctggaaaactcatgaataatccacccttgtttagcacatcatcaagcaataaatacaagtatccctagtccagcagcccaagctgctgctctaacaatggagtacccattgtttctttactttcttaatacacttgctttggctttgcactgtgctctcccatggattttttcttgcgtgagctctaagaactctctcttggggtcggatccggacccctttctggtaacagaagcactgcttcacgaagatcatgcaggtcagtacttaataagtacaaaaaagtctatagcgacactatttataattttaaaaatgattgaagtcaattaacatttaagtgttaaaaagaaagtaaacaacccaaatatacacaaacagtagactgctctggcttgcatacagagaggtccattgcccttttgggtgggcctaagaagcacttctggggagagggggcgtcaggctgtgatggctgcgggaggagtgactcctcccaggatgagggtctccatcctcccagtgctcactcaagttcagtatttccaagtccttccaggggcgtaacgcacgtcagaacggccattagtgtcacagatacgtgtccccttgcatttccaggaaatgcccttggttggcgaactacagtcgtgacagtcgggccacagggcgttttgtgagttatcgtcttgggcaaatgagtgccaaaaaaaaaaaaaaaaaaagacctgaaggtgaacagcatagcggcagggtttgggatgagaggagcccctttgctagcaacggcgagcacttgcgcggtaccagcaagggctgcccatgtctcggagggaaacgtttgtgtgagcgcaggaatgacccggaagaccttggcacggctgcagttttctgggaaatgtaatttcttggtccgggcgccatggcccttataagtagagggtgtcccttggtttcgagttgtatcgttcaccagaggacgactgtgtgccccaggacaatttgcgcatggtcctagctggccggctctaggtcgacggccccaggcggttaagctacttacaaagccgtgaccggtttgcccgcggcgcaccaggtccgcgcagccgcagagacccttgggaagtgtggtcttcgggtgccggcggttcgcggcttccgggacatttgtaccgcagggggaggattctgggaaatgtggttcgccgtgggcggtgcactgggtcagtcccgcgatagcttcaggcctggcggcggcttccaagctaaggaacggtttggggcagtgtcgttcccggaggtcggccgccgttacccgctcaccagctacgcggcgcgtcaggtccgcggaggcgcgggctcggggcgcctgcgggacggtgaggccctgctgaggactccggcaagtgtgggtcgcggcgacggcggggctaaggccctgggtccgcgcgcggtttgaccacggccggggccttgggcatttcctggccttcctgttgagccgtgtaaacgcggggtgatgacggcgccgacctcttggcactgttgtgagagcgaagtgggcgcgagagcagacgccagctacagttttttttgggttatgtcgtcatgaagccggcgctttcagttgtgcaaccttgaacaaatgggttcagtatctcggaatttcagttttgtcttcattttaaaaaataaatctggtttagaactcgacctcaagcgatccgcccgcctccgccttccgaagtgctgggattaaaggcgtaagccaccgcaccagcctaacgaacatggcgaaacgccgtctctactaaaaatacaaaaaaaaattagctgggcgtggtggcacgtgtctataatcccagctattcgagaggttgaggtaggagaatcgcttcaacccgggaggcagaggttgcagtgagtcgaggtcgctccattgcactccagcctggagacagaacgagactccgtctcaaaaaaaaaaaaaaaaaaatctggaataatatgaatgcacaccttgcaaagtggtgaagactgaacgagctgataaagttgttaccgttgttttatgagtcttttgtatacagaataattgattttccccgcaggtggcacctggtaaatagcccttgcggagaaacaccctgttccttcccagggagagattgacgctccggcgagtgattaccagtgtgcttttccattaaggtgtgtgacaggtgccgcaagataagcccgatttttcatgactgctttttcctgcctttctgtgccctcaggacactgcccatctctaagataagaacctggaaaggggactctgttggccattggaaattgcagaataatgtctcaggtaagtcggtgtgtccccaaatcttcctgaaacactttattaggcctctgtgtgtttgctttgcttctcctgcctgttcccacctaatcaagtccatttaagggactagatctatggttcctttcactataggaagaatggagcccacaggagagctccaaggtattgtcctcatcacccagtgttcctcttttctacagttttctgctagaagactttctagattgccaacattttaaaactgtaattcacaatgcaactttggaatgtaaggttattcggtttatggttgtcaaaactgtaccatgtggtctcaagtgaagagatgtttggagtcatccttgattcttccttttgacttataactcatattcaggtcctctagtttggatctaaacgatacaccgtatacagcatctgaccattagttagcccatcaccaccaccaccactaccaccccagtccgagccacctggattattgcggtagcctcctagctggattcccagcatctgcccttaaccctcatcagtctgttctcagtacagctgtgaccatggtcctattgttatataaattcctgtcattccgcaacctaaaatttttcagtggttctaactgagtcacttctgcaatgacctatttgtacaattaggccattacctccctgatcccaccttccttctctgcctcctcattcctgtgcgctccagcctctgtcaccagttgctgtgccatccacgtggaatattcttcccccacatacgcacaagcttgcatccttatctccttctgtgtttgttccgtggttactttctcagaacagcttccctgaaagcctatttgcaattgcagtcaccttccctagcgcttccactcctccatcactgctttgttgttttccacagtgtgtgtcactcactagctgatgtactgtatgttcagtatatgcacgtgctcattgtctgttcctggtgggaggaatgctttttcttctttgttgactgttatagcgtcagtacccagagtgttacctggcaccaaatggatgcttagtaagtaattgtggagtgaataagatgagtaatgaagaactggtggggcagaatcatggcatggaaggtgaagcttgcacaggaggggatgtaagtagcagatgtacatcttgggtgaagtctgttttcatggaataattaagataattagaattgaaaaactggtgtggtagtgcatgcctgttgtcccagttactcgggaggctgatgaggtaggaagatttcttgagccctctggtgtaagcctgtagtgagctatgattatgtcactgcactccagcttggtgacagagcaagaacctgcctcttgaaagaaaaaacaaagtaaaggctaaagtgaactaatgccaaaaccattcattggttcatcttctaaacacttatgaagtacctgttaggaagagttgtacatggattttggtgtacactgacacacaggacttcatgatctagtgcagtattgtctaagagaactttctgcagtggtggaagtgctgtgcatgtgtactgatcagtacggtagccaacagccccatctgactattgagtacttgaactgtggcttaagcaatggagaaaataaattttaaattttatttaattattttatttttacattttaattaatttaaatgttgtagccaagttggctagtggctcctgtattgaagattgtggcactggtagaaaagtaagaaagcatgggaaatttaaataagtgctaggatagatatcctatgttcttttgggaactgagatgagtgaacatctcaagctgcccaggcaactgaaggggaagaaagaagcatccctggctctaagttgtaatgactggtttgtcaaagatatgagaaatgttatttttatttgggatataggcaattaacacagtggcaactccaattaacaggtgaatttagaagaaattttgtgtagcaaattgaactgtcaaatcttacttgaggataagttattgtttatttggaaaatgtgtgttggattgtatctgcttgcctatataaaaagatgagatttcttcctgtccttttcatctcaatagtggatcgcttgtgaagtgcatcaaggtctgatttagcttattcagtaataaaactgctttctttttttttctacatttgtggagaggattttctgccattggaaggcgattcgaattttaattattttctccaaacctgagaaaagtaaattctgcctttaaaaccaaagatccatgtcactggtgaacatgcatgcaaaatatccaaataaagtaatacaatactgaatgaactctcagagctaaaaaattaccacagtagagcagtctgttttacaaatcacagacagtaataactctgtattaaatggctgtactttttgcacatattataatttgactagccaataagctattattgaatatttaaacttctaaagttttactattttaaataatactgtgaaatgagtactattgagaagaatttctaagcacatctgtgagcatttccttagaatattttctttgaaatctactcttatttttttccccttccaggtcctatttaaggactgtctatggcaggagtcctcaacctttttgacaccagggatcagtttcgtggaagacaatttttccacggaagtgggaggtggtggaggtgatggtttggggatgaaaccgttctacctcagatcatcaggcattagattgacataaggagtgtgcaacttcgatcccttgcatgtgcagttcacagtagggattgcgctcctgtaagaatctatgctatagctgatctgacagcaggtggagctcgggtgataatgctctttcctgccactcacctcctgctgtgttgcccggttcctaaaggccacagaccagtaccagtccgtggcccaggtgttagacccctgatctatgacatgaaaccatccttcagtcttttcacccaggagtctcatattttaattattaaatgtttgtcagcacgaagtttaagtatacaccacaaatatatttttcttttttgtttatgaatcagttatgtgtatgttttagtccatttgtgctgctgtaacaaataccccagactgagtagtttataaataatgaaaattgacttctcatggttttggtgcctgggaagtccaagatcaagaggcaggcatctggcaagggccttcttgctgtgtccttttgtggtggatgggcaaagagacgagagagaggcaaaggggggccagaactcatttttttaaataaggaaccctcttccctgatgatgacattaatccattcatgagggcagagtcctcaaggcccaatagtctcctaaagatctaacctctcaatactattagaatggtgattaagttcaatacatgcttttttggggaacataatcaaaccatatgtctatcagtctttaatattaagatgtcttttttttctgaacccattttttgtgagatttagtgaatctttctgagtatcatatttgagagacaattgctttagccttatttttaattacttagctagcatgtaagctataaaagatataactaaatacttgactctgtgctgtcaaatgtcaaatgttgatttttaaaaattcatataattctaaacttttaacaaaattactgaagcaaagctctcatatttgtctctcattcttattgtataaaaattctaagcacataactgtcccctttattgtataattccaactacataactgtcctattattacttacctgacatcacattcccagtcattgtcacagctcctgaatcttgttccatttcttccacaagcaggctaattttaccccttcttcagtgacagaagaggcctgggctatggctgagcctaaatatatttgctatttcaggtgacatttagtgatgtggctatagacttctctcatgaagagtgggcatgcctagattctgctcagagggacttatacaaggatgtgatggtccagaattatgagaacctggtctctgtaggtaaggatatcaccccttccactccaataggggacacctttcttttgccaccctgaattgctggagattctcctaagtaaatggctgaatttctgtaccatgctcccgaggaaatgtgcagctctgttgtgccctgcctaaagcttatctttccatttcagtgaacacccttcatccattcctgtggtccctcttgtgatggcctctcataatagaggaccacagcttaaacaattctatatttttcctgtaagcaggtctttccgtaactaagccatatgtgatcatgttattggaggatggaaaagagccctggatgatggagaaaaaactgtcaaaaggtatgattccacatgagtcatggtgaacgagacaaaggaagattttgttaaagatgtttatagtgagtgtggaagcattttagggatactgtcttcaaagatctcagatagaaatgaaaaattgagggatatttagcttagattttcaaaacaattgttcctccctctcaaattattatctgtatcactcatgtcacctaatcaaggttagaggtttttgccatcataataattcaaattgttactatattcatgacaaagtaagacaatttattctttcttaattctacttaagaaaaatatactaatagttttaagctaagaaaagctgtcagttagatggaaaatcacttttctaaagctgagctttgtagatgaaatatgaacatattagaggaagtaagggacatataaatgtttctaggaataatattttctaatgttcaagaaaaatatgattcacacagtttcttcataacctcagaaagcctatatctttgtcagctataaagagcatttactttgtttttactgcagttgtttaatatagtagtatcaattctgtattttaagcttgataatccagcagcaaattgagattaatggaaggttggaaaaaaaggctatgaaacaaaatgcaacctttcccacatgaatataggcacaaaatgatgatttgtaatcctgaatgccttccacatcttatttctgatactttccttttttccatactattttatccatttcgtacagcttacccatttcctttatcacactctgttcctgcttctgtgaactttggattctctgctctatttgagcattgttcagaagtcactgaaatatttgagttgtcagaactatgtgttttctgggtgcttcatttcttatccaattctcctaattccactgtagaagcttttttcaagaagtaaaaaaaaaaaaaaaaaaaaaaaaaaaaaaaaaaaaaaaaaaaaaaaaaggcagtgctttgctttcttgatatatttcagattgggaatcaagatgggaaaacaaggaattatcaacaaagaaggatatttatgatgaagattcaccccaaccagtaacaatggaaaaagttgtaaaacaaagttatgaattttcaaattctaataagaatttggaatatacagaatgcgacacatttagaagcacctttcattcaaagtctactctttctgaaccacaaaacaattctgctgaagggaattcacacaaatatgatatattaaagaagaatttatcaaaaaagtcagttataaaaagtgagagaataaatggtggaaagaaacttttaaattctaataaaagtggggcagccttcaaccagagcaaatctcttacccttccccagacttgtaatagagagaaaatctatacatgcagtgaatgtgggaaagcctttggcaaacagtcaatcctcagtcgccactggagaattcatacaggagagaagccctatgaatgtcgtgaatgtgggaagacttttagccatggttcatcccttacacgacatcagataagccatagtggagagaaaccttacaaatgcattgaatgtgggaaggcctttagccatggctcatcacttactaaccatcagagcactcacacgggagagaaaccgtatgaatgtatgaactgtggaaagtcttttagtcgtgtgtcccttctcattcagcatctaagaattcatacgcaagaaaaacgctatgagtgtcgtatatgtggaaaggccttcattcatagttcgtctctcattcaccatcagaaaagccatactggagagaagccttatgaatgtagagaatgtgggaaagctttctgctgtagctcacaccttactcaacatcaaagaattcacagtatgaagaaaaaatatgaatgcaacaaatgtctcaaggtctttagtagcttctcatttcttgttcaacatcagagtattcatactgaagaaaaaccgtttgaagtttagaaatgcaggaaatccttcaaccagcttgaatcactgaatatgcatttgagaaatcacattagattgaaaccctacgaatgcagtatatgtgggaaagcctttagtcataggtcgtccctgcttcaacatcacagtattcatactggagagaaaccttacgaatgtattaaatgtgggaagaccttcagctgtagttcaaaccttactgtacatcagagaattcatactggagaaaagccatataaatgtagtgagtgtgggaaagcttttagcaaaggctcgaatcttactgcccatcaaagagtacataatggagagaaacccaatagtgtggtaagtgtggaaaagcctttagatcatatgaatccctatacatgtgagaaatcttacagaagagaagcagtgtttatcacggtaaacttcattcatagatcctcccttatttaacatcagaaaaatgtatactggggaaaagttgtatgaaggtggtgaacatgggagacttttagcaatgatgcagatttttttattagagtttatactgtagagaaatcatatgaagtcaataaatgtgggaaagcctttgtcagtattaatcccttaattgacctaagtatactcacactaggaaaaatctgtgtacatgtagcaaatgtgggaaagactataggcaataggaatctcctgcaaactcctacaggagaaaagttgtatgaatgtggaaactttagaaattgaaggaatttttcagttccaagtgcatcccttattctataggaaataaactggagacaaatctcatttaagagatgcagcaaagtgttcactaagagtgtttatcttgccagacataagaagatgaatggtagagcaacctgaaggatttagaaattacatataaatctttgcagttatgctatttgtaaacaggattatataggagagcaaataaacataagtatgcatttcttagagcagtagcttgcagtttcagttgagttctacttagaaattctttttagctagtgggcatgtgaagatatttagtcacccagaggagccagtaaatgttataatgttaaaaattaaagctgcaaaagaaataaaatggtgttaataaaaatttggcatctaataaaatcattttgtatatcatgaactctttctctgtgactgtttgcgacaaaaaaaaatttcactaagattagccttagtatagcctttagcgggagactagcaaacttcgagaagaatggcctgctctttatactaagaatagcagtattttggtgaggattattgagtccatatccagtaggcttaattaaatacatttcaagaacatttactgagcattactcatgtgtattacacagggatgggataaaggaatctagtagttctgagctctagtgctgtgtcgaaatcactggaaggacgtgttaaagcacagattgctaagcctcagtcctagagtttctgtatgagttgatttgaatttgcatttttcacacgttcttaggggacactaacactgtttgtccagaatataataataatgttatggtgtcactgacaacatattgtttcctcaatcttacctattaaccatttcttgagcatcttctgtggacttaagaaacactccatactccttaagagcttcgagatgtgtgtgtgtgaagagcattaagctttggagtcttgttacctgggtttaaatccaagttacatgtatactggctttgtgaccttggacaaactgtttcactgggtcatgctgcagtttctccatctgtaaaatggtaataaacctatttcacagcattattatgaaagttaaatgagttaattgatgcacaatgtttacaacaatgcctggcctctcaatagcattcagtaagtattagctatagctattgatttcatcatcatcgtcttctcatggttgcttcattattctggtctcagatgtcacatctaatcacttgccactcttatctgtttactgtttcacatttttgggggagagcatttacaaaacacccccgtttccttccaacaaatcctttagtatctgagccattttgagggaatgtttcttgcccaaaataacctaaggagaaacaaagagaccagataggagatgagatgagaattcagcaggtctctgagaaggaagaaggatgccctacagagttggaaaatgggccgagtgaaggaggcatcaggcttccacatggaggaaaggggagggtttacccactgagaccagaagactacaggtctttggcatcatctctgagtacagagtcccatgggctgggtgccactgccctcactcttcctgaatggaggttacagcctgtcattgaaggtcaccgatgcctggaaagtcagagttttcttgttagccttgggccagtcaaatgtgattagaactcagttgctggtaaacatctagaaagaaccaatgaacatatcactgagcacttcctgggagcttaattctttgctgctgagggggagtcagtttttaaacaaattgcaattgtgttagaggaaaaaagctttatatgcagaagtaattaatggaagatacaagacaatgacaaggccgtgtggcccgtatggcccgagaggtgctgagggtaagcactctggcatcaaagaaatagggaaaaactataatgatcataatacaataccgttaatagcagcagccactgcgccttgtgtttgctttgtgtgctgcattcagacaattaaatgctgtcagctctggacacaaattgctaggtgtgaattcagcctattgggactgtcgcttgcttattctatacacttggggaagtcacttcatttcccgatgtctccatcaaaacaaaaatatttctcatcaggtggttgtgagaattaaaagatatataaagcaagcaacaaagtgcctctgcatggaagtttgttgccgtgtttttcctgctttcaataatcttcccacatactgtaaggtaaatgccataatcatctttgtgctagtgagctgagtgagtctctctcagagtcacacatcttaggaatataggctacatttgaacatttagtaaaagaccacacaatattgcccttctaggacagatctcagaagactgggatttctcttggcaaccataaggctctcttgcctcactgaacaaaaaacatttcctttggccatgccgctccttctgcctagaatgtgtcccataccccatttattaccacgcttacctgccaagggaggcctgcctaccttgcaaagctcactaggtgtgtcaaagacgaacaaagctggacattaatgacagtggtaagaacagactaattgataactattgcaatggggaaaggaatttggcatgaagtcaactaagctttgatttgtacaaaggtaaatgagtatgttaaagggagggtgaagaaatagggggtggtgaggagcggttcagtggagtcagaaaagtgaaaaattaggaagggagggggctggtctatgtgcagtcttatctgggtttgctactggcacttttgagttaggctcatatcctcccacagaggctgggagacaggggccttatcttcaggtgctggctggaagaaattctttggacagccttgagttttttggaaaggcactttaggagtcattagaaaatgttagtgttgttcaagtctcaataggccacagttgacaggcatattcaagaaggctcagaggggcctggatagagtttggtcaaagaaaatctttgtcaggtgtcaccgcaggcttctccagcccactgaggaggaatggtggtgaagacaaaagaacataggcaagggatcaaagtacagggtgtgagtttctgccaagagttgcgtgaccctgagaaggtaacttaagttttccaaatctcaggttccttttctgtaaagcaggaataatagaaactaactctgagaaaattgggattaaatgaagtgctacataatggtgctacataacgagttaccctcagagctcaataaatgtagctattattgttatttagcctctttgctcccacaccaccctggaaaacccaaccaagtcctgatctctacttttgtacgtgtgccacattccctgcacaaagattccagaagatgagaaatacttaacctagaaccagcaaggccgaaaaaaaaaaaaaaagactctcctactaggtgacattggtgcagaacagggaaggatgcaaaggaggagaggagagggagaggcactgcagagatctggactcagtgtcccaggcagagggaaagactgggaagtcggaaagagcttggaatgatcaggacagcttggcaggagagcagtgagcaaaggaagatggagtagaggatgcatttctaggactgtttctctttagaaatagcatccagaatgtccctgaatggtgctgggcactgggaacacacattaaacattagccatctctggtactctcacctagaatgaatgatggttaatatttcccctttaagccttccttaggaaaatggaggtgaaaggtagcaaggtagcttgcacaaggccacagccctgagatagggcacagcacgatccaaacatgtctctggattctgcaggcgatgcctctcctgaggatctgcacatgctgctgtacgtgaatggtggggggtactaagaagttgtagttcatacttccccaccacataccactgatttctagaaagaggaattttctcttgtaatacttgatgtaactctaggactctggacagacagtgaccctatcagcaggaagagaaggcctgaagaatcccaggattccacgatcttccatgtcagtgtgccacagccatgtggttgagagtccaagtatgtgagactgggggatagttaatacaactgtgctaggagggaagcgactatatcagtacttcagactcagctgaactctctcccaggccctgcaaaggtgtctagatgggtcctatccttcttagtggccttcctagcttggtcccaaagagcctcctgcatccactgggtggtgtgggcagacaagtcatgtgacaaatggaagttcacccttgcagtaccaaaagtccagcccatgataatgcaggctgcaggaaacactcctgtcccaggctgtcatttggacatatgaagcacatccttctgggtaatgtagctcttcaccttatctgaggcaatagctaagtagcatccagaggaccactaggaagaagcatcaaaagacttccatgagagtggtacttcacatcagttcgtatgaaccgggctttcttgcatggatagttgttcaatttggtgtttctgtagggaggaggggatgatcactagaggattcttttcaactattttatcctacttcctcccaaaacatgtatttttttctaaacatgtttttgggtctttttaaaaatacgtctgtcttgtcaagtgttcctttactctcttgaacatttcatacaattttaataacttttaatatacttctttcccaattctaccatgtgtgtcatttctgggtctgtttatactggttgattgttctgataataggttatacttttctgcttctttgcctgcctggtaattattttttcaatgcaaaatattgtgaaatttaattttttaggtgctggataactctgcatttctacaaatattcttgagttttgttctgttactcagttaagttatttggaaatagtttaatccattggaaactttttgcaagttttgttaggtggcacaaaggcagccatatgcaaagtgaattttatataatacctttcttgagttatctacttgtctccccatgaataaccagggtattcctctctggctttaggaatacaaagtatttccagccctgtgtaaattccagacattgcttccccctgctcctttcaggtggttgttccctagtcttgggctattttctcacatgcataaacagcagtattcagtgaggacttaacagggactttctgcagaaccgtgaagatctctctgtgcagctctctcctctgtagtctcctgtcctgaaaatgtagccaccttggccaccgtagagtcctaactctgtctcaggagctcagagactgctgattttccctgggattcccccttcctgctttgcagtctggaaattctctgaagggaatctgaggcaattacttggttccttgtttccctctcccagagatcactcttctgtgctgcctgatatccaatttctgaaaattatcatttttgttgagtgttcgatgttctaggtgggagtgtaaatctggcccatgctacaccattgtggccagatacagtaatctttttgtcttgttttgatgtcttatgacattctatttgactacaaacatggggagagtgttatttcttataataaatatcatgccagagtaggcaaagaacgtaatggaattaaggatttcaggagtaactgtggattttggcgggggggggggggcaatatatgcaaatatttattgataatttctaggtggaggatgtttctttaatgactaaattttttcccttatctagcttacatttggtagtggcagagaaataacaaaaaagatagcccaacaaatatgagcatgttagcagagaaagcagggaaaggagggaggcaattggagggcagaaagtgggtagaagagatacagccagagaaactaataatgtggcattggagtggtgtcctgaagaaaggttcggattgagttttcacgtttgaaacatatgttagcattccaggttttgtgctaagtggtaggttcatgaatgactactacattgttaataatcaatcattcattgaagactgaactcaaaacttccctaggggaagagagtttcagaatataagatttgtcacttcctagcatcttcaccattcctctcctctcttttcatttcccaccatttttcatagttctccttgccattccttgtaatatatatttgttcatttgtttgttttccggagacagggtctcagtctgtcacccaggctggagtgcagtgatgcagtcataactcactgcagcctggaactcctgagctcaagcgatcctcccatctcagtctctggagtcactgggaccacaggcatgcaccaccacacctggctaattaaaaaaaaaaatgtagacatggagtcttgctatgttacccaggctggtcttgaagtcctgggctcaagcagtgctcctgccttgatctctcaaagtgctgggattacaggtgtgagccatcatgcccagctcttgtagttttttgatttttatactctacttatcactccaggacagtctttattactcacttcctttgttgttctttgtcacctcctgccaagctcagcttccctgccactcttcctctgtgtccaccaccccctcgctttgcatcattcctccccttcattctctgtgtgggctgtgccccccttccaggctctatattggcatcgcctctagggaagggtttgcccagtttatggtgccagcagcagagtgtgtgagcacttgtttctccacattctgacacattgcttgtcagacattttgtccttgccagtccaatagaagagacaaaaagccatcccaggataaatgttttaatggtgcagagacttattgaattaacctcgattcatgatgtcctccgataaacttcttcattgaaggattattagtaatgtagtagtcattcatgaacctaccacctagcacaaaacctggaatgctaacatatgtttcaaagccactttttttggttgttttctttgaacttttctgctaggaacatttgctccttttcccaccagtatgttggtctttttcttatcatttgtaggagctgtggagggactccatacatactaggaaaataagccaattgtaatatgacttgcaaatatcttcaccataattttctcctaacattttgaatttttttgatgcagttggccatgcataatatttcattttttatgcagtcaaattgatcaatttgggttttttaatctttgcaatggtcttctttcttctgagattctaaaagatattcttctttatttttttcccaagagtttcatgggattttttttcttactctttcaatgtagaaatatttcagagatctgaagttaattttgaagtaggctgtgagaagtagagccaactgtttaattccctcagatgtttaatcagtagattcaacaccactttatttacaaaaaatccagatcgccttgattagcaagttaccttttttcacaaaattttgattatttagatgtatttctgtctttccattgagagttcacttattggtgcatgctcacatgcatatgtgtgttttaaagaatacttcatagggcttcttgtccctaatactctattttaaaattctttctcagcattttcacttatttttctaagtatattatgaatgtcatttaaatgaaccatccaatagtagcattttgagttttgtttctttcattcatcttaatccacgtgagactcttctatgttgttgcatgtgtcaatagtttgttcctcttgtggcttcatggaattcaactgcatgagtgtaacacactttgtgtatccatccaccagttgaacaacatttgagttgtttccagtttcaataaactgaaatctgagtaaaactgttataaatattgctgatcagggttgttgttgttgttgttgttttttgagatggagtctccctctgtcgcccagactggagtgcagtggcgtgatctcggttcactgtaacctctgccacccgggttcaagcgactcttgtgcctcagcctcctgagtagctgagactacaggtgggtgccaccacacccagctaatttttgtatttttagtagagacagggttccaccatattggacaggctggtctcgaactcctgacctcgtgatccacccgccttggcctcccaaagtgggattacaggtgtgagccagtgcccgaccgctgattaggttttttatgtgaacataaatcttcattctcttgggtgaatacttagaagagggattgttgggtcatgataaatggaagattaattttataaggataaagtacatctttttctttaaaataaatctcgttagaagaactcaaacaactccacactaaaaaaaacaaagagacaaataatcccattaaaaattgggctaaggacatgaacaaacatttctcaaaatgtgacacacaaatggccaacaggtgaatgaagaaaatgctgaacaccactaattatcagggaaatgcaaatcagaactgcaatgagatatcatcttaccccagctagaatggctgttattaaacagacaacaaaaataacagatgctagtatggatgtttagaaaagataacacttatacactgttgcctggaatgtaaattagtgtggtcactagggaaaatagtatggtgatttctcaaaaacctaaacaactaaaaatggaagtaccacatgatccagcaattcccctgctggacatttatgcaaaggaaaattaatcagtgtatcaaagagatacctgcactcacatatttattgcagcactattcacaatagcatagatatggaatcaacctaagcattcatcaacagatgaatggataaagaaaatgtggtgtatatacacaatggaatagtatatggccataaaaaagaatgaaatcttatcattcacagcaacgttgatgacatggaggtcattatgctgagtgaaataagccagacacagaaagacatactgcatattctcacttccatgtgggagctaaaaaagttgatcatggaggcagagattacaatgatagatatcagaggctgggaaggggagggaatgaagagagctaggttaatacaggtagataaaatatataagctcattctttgatggcagaatagaatgactataggtaacaacaatgtactgtatattttaaagtatccagaaaaaaggatttgaattgtctcaacacatgaaaataacaaatactcaaaatgatggtgatgtagtttggatgtgtgtcccctccaaatctcatgttgaaatgtgatccccagtgttggaagtggggcctagtgaaggtgttggagtcatggtggtggatccttcttgaatggcttgggaccattcccagtggtaacgcgctcacaggagatctggttgattaaaagagatggggacctccctgctcttggtcccactctcacatgtgacttgcctgttatagctccaccttctgccatgaatatgagcttcctgaggcctcatcagaagctgagcaaatgctggtgccatgcttgtacagcctgaagaactgtgagccaaataaacctcttctctttacaaattaccctgtgtcaggtctttctttaaagcaatgcaaaatgggcaaatagagatagaggcctgatgtggtggctcacacctgtaataccagcactttgggaggtcaaggaaggagaattgattgaggcccagagttcaagaccagcctgggcaactgagtgagatcttgtctctacaagaaaactgaaaaaattagccaggcacagtggctctcacctgtggtcccagctactcaggaggctgaggcaggaggatcacttgaacctaggaactcaaggctgcagtgacctagtattgtgtcactgcactccagtctgggtgacaaagcaagacctcatctcttaaaatacatagatagatagatagatagatagataccacatatactgttacttgatcattaacattctatgcatgtaacaatattatgcataccccattaatatctacaatattatgtatcaattttaaaaaaatcttattggtattttcattgttattacattaaactggcttctatttttaccagaaaacgcacctttattctattgaaaattcccattcaatattttcatttatttaaattctgtttatatttgtccctcatgaggattttagagttaaaaaaaaatagtcattagttggagggatctggcaagatggccaaataggaacagctccggtctgcagctcccagcgagaccaatgcagaaagtgggtgctttctgcattctcaactgaggtaccttgttcatctcattgggactggttaggcaataggtgcagcccatggaaggtgagcagaagcagggtggggcgttaccttacctgagaactgaaaggggccagggacctccctcccccagccaggggaagctgtgagggactgtgctatctggcccagatactatgcttcttccacagtttttgcaatctgcagaccaggagattccctcacgtgcctacaccactagggccctgggcttcaagcacaaaactgggtggctgtttgggcagacactgagctagctgtaggagttttcataccacagtggtgcctggaaccccagagagacagaaccatacactcccctggaaagggggctgaagccagggagccaagttgtcttacttgatgggtcccactcccacagaacccagcaagctaagaaccactggcttgaaattctcactgtcaacacggaagtctgaagtcgaccttggatgatacagcttggtggggggaggggtgtctgccattactgaggcttgagtaggtgggtttcccctgaccctgctaaggactggcctgaactaaacacagtgaggcaaagtgactgtggtcagactgcctcgctagatcctcttcactaggtggggcatctctgaaagaaaggcagcagctccagtcagaggctggcttataaataaaaactcccatctccctgggacagagcacctgggtgaaggggcagctttggacacagcttcagtggacttaaacgttcctgcctgttggctctgacaagaggagtggatcctgacaaggaaggttctcccaacacagtgcttgagctctgttaagggacacactgcctcctcaagtgggtccctgacccccatgcctcctgactgggggaaacctcccaacagaggttgacagataccccatacagaagaactctggctagcatcaggccggtgcccctctgagacaaagcttccagaagaaggagcaggcagcaatctttgctgttccgcagcctttgctggtgatacccaggaaaatagggtctggggcggacctccagcatactgcagcagacctgcagaagaggggcctgttaaaagaaaaactaacaaacgaacacaataacatcaacatcaacaaaaaggacccccctacacagaaaccccatccaaaggtcagcaacctcaaagatcaaaggtagataaatccatgaagatggggagaaaccagcccaaaaatgctgaaaattccaaaaaccagaatgcctcttctccaaatgattggaacccctctccagcaagggcacaaaactggacagagaatgtgtttgacgaattgacagaagtaggcttcagaaagtgggtaataacaaactcctctgagataaaggagcatgttctaactagaataacaagtttagagaagaacataaatgacctgctggagctgaaaaacacagcacaagaacttccttaagcatacacaagtatcaacagctgaatcaatcaagcagaaaaaaggatatcagagattgaagatcaacttaatgaaataaagcatgaggacaagattagagaaaaaagaatgagaaggaatgaacaaaatctccaagaaacatgggactatgtgaaaagaccaaaccaacgattgactggggtccctgaaagtgatggggataatggaaccaagttggaaaacacacttcaggatattatccaggagaaattccccaacttagcaagacaggccaacattcaaattcaggaaatacagagaacagcactaagatactccttaagaagtgcaaccccaagacacataattgtcagattctccaaggttgaaacgaagaaaaaaatgttaagggcagccagagagaaaggttaggttacctacaaagggaagcccatcagactaacagcagatctgtctgcagaaacccttcaaaccagaagagggtggggcccaatattcaacattcttaaagaatttttaatccagaatttcatatccagccaagctaagtttcataagtgaaggagaaataaaatcctttgcaaacaagcaaatactgagcaattttgtcaccaccaggcctgccttacaagagctcctgaaggaagcactaaatatgaaaaagaaaaactggtaccagccactgcaaaaacaccaaaatataaagacaagtgacactataagaaactgcatcaactaacatgcaaaataaccagctagcatcatgatgacaggatcaaattcacacataacaatattgaccttaaatgtaaatgggctaaatgctccaattaaaagatacaaactggcaagttggtagagtcaagacccattggagtgtgtattcaggagactcatcttacatgcaaagacatatatagactcaaaataaagggaatgaggaatatttaccaagcaaatggaactcaaaaaaaaaagcaggagttgcaatcctagtctctgataatacagattttaaaccagcaaagataaaaaaagacaaagaagggcattacataatggtaaagggatcgatgcaacaagaagagctaactatcctaaatatatatgcacccaatacaggagcacccagattcataaagcaagttcttagagacctacaaagagacttagactcccacacaataataatgggagactttaatagcccactgtcaatattagatcaacaagacagaaaattaacaaggatattcaggacttgaactcagctctggaccaggcagacctaatagatatctacagaactctccaccccaaatcaacagcatatacattctactcagcaccacacagcacttactctaaagttgaccacataagtggaagtaaaacactcctcctcaacaaatggaaaagaacagaagtcataacaaacagcctctcaggacacagtacaatcaaattagaactcaggattaagaaactcactcaaaaccacacatctacatggaaactgaacaacctgctcctgaatgactaatgggtacataatgaaattaaggcagaaataacgaagttctttaaaaccaatgagaagaaagatacaactggctgggcacagtggctcacacctgtaatcccagcactttgggaggccaaggcagatcacgaggtcaggagattgagaccatcctggctaacactgtgaaagcctgtctctactaaaaatacaaaaaattagccgggtgtggtggcgggtgcctgtagtcccagctactgggagactgaggcaggagaatggcatgaacccgggaggcagagcttgcagtgagccgagatcactgccactgcactccagcctgggcaacagagtgagactctattctcaaaaaagaaagaaagaaagaaaaagagagagacgaaagaaagagagaaagaaagagagagagaaaaagaaataacataccagaatctctgggacacagctaacgcagtgtttagggggaaatttatagcactaaatgcccacatcagaaagcaagaaagatctaaaatcgacaccctaacatcacaattaaaataactagagaagcaagagaaagcaaattcaaaagctagcagaagacaaaaaataagtaatatactaccagaactgaaggaactagagacatgaaaaacccttcaaaaaatcaatgaatccaggagctgggtttttttttttttaagtttttatcatgtttatttaactacaggtataggatgaagatgcacttcaaatatcatgggaaattaaatattctgtgttggtctactcttttaaatttcagtgtacctcttcttaactaaagagaaatgtcttaaacctctttacactttacatccattttatgcatttagattcttctccagtatttcatttattcatttttttttattattatactttaagttttagggtacatgtgcacaacgtgcaggtttgttacatatgtatacatgtgccatattgttgtgctgcacccattaactcgtcatttagcattaggtgtatctcctaatgctatccctcccctctcccccaccccacaacagtccccagtatgtgatattccccttcctgtgtccatgtgttctcattgttcaattcccacctatgagtgagaacatgcggtgtttggttttttgtccttgtgatagtttgctgagaatgatggtttccagcttcatccatgtccctacaaaggacatgaactcatcattttttatggctgcatagtattccatggtgtatatgtgccacattttcttaatccagtctatcattgttggacatttgggttggttccaagtctttgctattgtgaatagtgccgcaataaacatacgtgtgcatgtgtccttatagcagcatgatttatagtcctttgggtatatacccagtaatgggatggctgggtcaaatggtatttctagttctagatccctgaggaatctccacaccgacttccacaatagttgaactagtttacagtcccaccaacagtgtaaaagtgttcctatttctccacatcctctccagtacctgttgtttcctgactttttaatgatggccattctaactggtgtgagatggtatctcattgtggttttgatttgcatttctctgatggccagtgatgatgaacattttttcatgtgtcttttggctgcataaatgtcttcttttgagaagtgtctgttcatatcctttgcccactttttgatggggttgtttgtttcttgtaaatttgtttgagttcattgtagattctggatattagccctttgtcagatgagtaggttgcaaaaattttctcccattttgtaggttgcctgttcactctgatggtagtttcttttgctgtgcagaagctctttagtttaattagatcccatttgtcaattttggcttttgttgccattgcttttggtgttttagacatgaagtccttgcccatgcctatgtcctgaatggtaatgcctaggttttcttctagggtttttatggctttaggtctaacatgtaagtctttaatccatcttgaattactttttgtataaggtgtaacgaagggatccagtttcagctttctacatatggctagccagttttcccagcacaatttattaaatagggaatcctttctctgctgcttctttttgtcaggtttgtcaaagatcagatagttgtagatatgcagcattatttctgaaggctctgttctgttccattggtctatatatctgttttggtaccagcaccatgctgttttggttactgtagccttgtagtttagtttgaagtcaggtagcgtgatgcctccagctttgttcttttggcttaggattgacttggcaatgcgggctcttttttggttccatatgaactttaaagtagttttttccaattctgtgaagaaagtcattggtagcttgatggggatggcattgaatctataaattaccttgggcagtatggccattttcacgatattgattcttcctacccatgagcatggaatgttgttccatttgtttgtatcctcttttatttcgttgagcagtgttttgtagttctccttgaagaggcccttcacgtcccttgtaagttggattcctaggtattttattctctttgaagcaattgtgaatgggagttcactcatgatttggctctctgtttttctgttattggtgtataggaatgcttgtgatttttgcacactgattttgtatcctgagactttgctgaagttgcttatcagcttaaggagattttgggctgagacgatggggttttctacatatacaatcatgtcatctgcaaacagggacaatttgacttcctctgttcctaattgaataccctttattcccttctcctgcctgattgccctggctagaacttccaacactatgttgaataggagtggtgagagaggacatccctgtcttgtgccagttttcaaagggaatgcttccagtttttgtccattcagtaggatattggctgtgggtttgtcatagatatctcttattattttgagatacgtcccatcaatacctaatttattgagagtttttttagcatgaagagttgttgaattttgtgaaaggccttttctgcatctattgagataatcatgtgttttttgtcttttgttctgtttatgtgctggattacgtttattgattttcgtatgtcgaaccagccttgcatctgagggatgaagcccacttgatcgtggtggataagctttttgatgtgctgctggatttgctttgccagtattttattgaggatttttgcatcaatgttcatcaaggatattggtctaaaattctcttttttggttgtgtctctgcacgactttggtatcaggatgatgctggcctcataaaatgagtcagggaggattccctctttttctattgattggaatagtttccgaaggaagggtaccagttcctccttttacctctggtagaattcggctgtgaatccatctggtcccggactctttttggttggtaagctattgattatttccacaatttcagagcctgttattggtctatttagagattcaacttcttcctggtttagtcttgggagggtgtatgtgttgaggaatttatccatttcttctagattttctagtttatttgcatagaggtgtttgtagtattctctgatggtagtttgtatttctgtgggatcggtggtgatatcccctttatcattttttattgtgtctatttgattcttctctctttttttctttattagtcttcctagcagtctatcaattttgttgatcatttcaaaaaaccagctcctggattcattaattttttgaagggttttttgtgtctctatttccttcagttctgctctgattttagttatttcttgccttctgctagcttttgaatgtgtttgctcttgcttttctagttcttttaactgtgatgttagcgtgtaaattttggatctttcctgctttctcttgtgggcatttagtgctataaatttccctctacacactgctttgaatgtgtcccagagattctggtatgttgtgtctttgttctcgttggtttcaaagaacatctttatttctgcctttattttgttatgtacccagtagtcattcaggagcaggttgtttagtttccatgtagttgagaggttttgagtgagtttcttaatcctgagttctagtttgattgcactgtggtctgagagacagtatgttataatttcggttcttttaaatttgctgaggagtgctttacttccaactatgtggtcaattttggaataggtgtggtgtggtgctgaaaaaaacgtatattctgttgatttggggtggagagttctgtagatgtctattaggtccgcttggtgcagagctgagttcaattcctggatatccttgttaactttctgtctcattgatctgtctaatgttgacagtagggtgtgaaagtctcccattgttattgtgtgggagtctaagtctctttgtaggtcactaaggacttgctttatgaatctgggtgctcctgtattgagtgcatatatatttaggatagttagttcttcttgttgagttgatccctttaccatatgtaatggccttctttgtctcttttgatctttgttggtttaaaatctgttttatctgagactaggattgcaacccctgcctttttttgttttccatttgcttggtagatcttcctccatctctttattttgagcctatgtgtgtctctgcatgtgagatgggtttcctgaatacagcacactgatggatcttgactctttatccaatttgccagtctgtgccttttaattggagcatttagcccatttacatttaaggttagtattgttatgtgtgaatttgatcctgtcattatgatgttagctggttattttgctcgttagttgatgcagtttcttcctagccttgatggtctttacaatttggcatgtttttgcagtggctggtacaagttgtccctttccatgtttagtgcttccttcaggagctcttgtagggcaggcctggtggtgacaaaatctctcagcatttgcttgtctgtaaagtattttatttctccttcacttatgaagcttagtttggctggatatgaaattctgggttgaaaattcttttctttaagaatgttgaatattggcccccactctcttctggcttgtagagtttctgccgagagatctgctgttagtctgatgggcttccctttgtgggtaacccgacctttctctctggctgcctttaatattttttccatcatttcgactttggtgaatctgacaattatgtgtcttggagttgctcttctggaggagtatctttgtggcgttctctgtatttcctgaatctgaatgttggcctgccttgctagattggggaagttctcctggataatatcccgcagagtgttttccaacttggttccattctcctcatcactttcaggtacaccagttagacatagatttggtcttttcacatagtcccatatttcttggaggatttgttcgtttctttttactcttttttctctaaacttcttttcatgcttcatttcattcatttcattttccatcactgataccctttcttccagttgatcacatcagttactgaggcttatgcattcatcacgtagttctcgtgctgtggttttcagctccatcaggtcctttaagcacttctctgcattgattattctagttatccattcgtctaatttgttttcaaagtttttaacttctttgcctttggtttgaacttcctcctttagctcagagtagtttgatcttctgaagccttcctctctcaactcatcaaagtcattctccgtccagctttgttctgttgctggtgtggagctgcattcctttggaggaggagaggtgctctgatttttagagtttccagtttttctgctctgttttttccccatctttgtggtctttgatgatggtgacgtacagatgggtttttggtgtggatgtcctttctctttgttagttttccttctaacagccaggaccctcagctgcaggtcattggagtttactggaggtccactccagaccctgtttgcctgggtgtcagcagtggtggctgcagaacagtggatattggtgaaccgcaaatgctgctgcctgatcgttcctctggaagttttgtctcagaggagtacctggccgtgtgaggtgtcagtccacccctactggggggtgcctcccagttaggctactcaggggtcagggacccacttgaggaggcagtctgcccattctcagatctcaagctgcatgctgggagaaccactactctcttcaaagctctcagatggggacatttaagtctgcagagtttattgctgtcttttgtttgtctgtgccctgcccccagaggtggagcctacagaggcaggcaggcctccttgagctgtgggctccacccagttcgaagttcccacccactttgtttacctactcaagcctgagcaatggtggacgcccctcccccagcctcgctgctgccttgcagtttgatctcagactgctgtgctagcaatgagcgaggctccatgggcgtaggaccctctgagccagatgcaggatataatctcctggtgtgccgtttgtgaagcccattggaaaagtgcagtattagggtgggagtgacccgattttccagatgctgtgtgtcacccctttctttgactgggaaagggaattccctgatcccttgcacttcccgggtgcggtgatgccttgccctgctttggctcacgcacagtgcatcacacccactgtctggcactcccctgtgagatgaacctggtacctcagtgggaaatgcagaaatcacccatcttctgcatcactcacgctgggagctgtagactggggctgttgctatttggccatcttggctccacccatggagctgggttttttttaaaagattaacaaaatagatagaccactagccagactaataaagaagaaaagagagaagaatcaaatagacacaataaaaaatgataaaggggacatcaccactgatcccacagaaatacaaactaccatcagagaatactataaacacttctatgcaaataaactagaaactctagaaaaaatggataaatttttggatgcatacaccctcccaagactaaaccaggaagaatttgaatccctgaatagaccaataataaattctgaaattgaggcagtaattaacagcctaccgacagcaacaaaaaaagcccaggactagatggattcacagccaaactctaccagagatacaaagaggagctggtaccattccttctgaaactattccaaacaatagaaaaagagggacttctccctaactcattttatgaggccagcatcatcctgattccaaaatctggcagagacacaccagaaaagaaaatttcaggccagtatccctgatgaacatcgatacgaaaatcctcaataaaatactggcaaactgaatccagcagcacatcaaaaagcttatccaccatgatcaagttggcttcatccctggaatgcaaggctggttcaacatacacaaatcaataaatgtaatccattacataaacagaaccaatgacaaaaaccacatgattatctcaatagatgcagaaaaggcctttgacaaaattcatgctaaaaactctcaataaactaggtattgatggaacatatctcaaaatgataagagcgatttatgacaaacccacagccaagttgaagttgcttatcagcttaaggagttttggggctaagatgataggcttttctaaatatacaatcatgtcttctgcaaatagagacaatttgacttcctctcttcccatttgaataccacttatttctttctcttgcctgattgctctggccagaacatccaatactatgttgactaggagtggtgagagagggcatccttgtcttgtgccggttttcaaaggtaatgcttccagtttttgcccattcagtgtgatactggcccctaaatctgtccctggaagctgctgacagatcaccatagggggcagaatgggagagagtggggcaaggataggagggccatctgtttcctccttcccactctcacctgtctggaagcacagctctctgatcaccagcaaggccagcacaagcagtgcccccttcatcgtgttgtctactggagtgttctgctcagggcagggcttctgctgctttataaacaaatgcccgtgggctgggacctggcacatgtgctttcctcacctgagaagtggtgcccacaggaagcccctcccactctgtggaaacaaagggctaaagatgttgatccagctgctgttgattctgctgctggtggctttggagagaagcagttgtaccttggccaaggagcaactgcagctgacctttctaagtggcaccattcagccccaaatgctctgttgtcccacccccaactgtcacctctgctttctggccacattcttcccccacctttcctggctccaaaagtagcactctcccaaaattaggagataaaaaccacagaaggtccaaggacaggtttatgccactgtaggtagccaaaataccatggagaaccttctttaggaaaacagtttcttggcacaaacaagatgagattgtctatgaaaattctagcagaaggaggcctgagaaagctccgaaggatcaaatgtggaacaatctgagcaatgaaataaatcacatagtatgggattataacccagagtataaaatagtataaaataacatacggttggccctttgtatgcgtgggtttcacatctgtaggctccacatctgttcattcaactgagcatagattgaaaatacttggggagtaggggagggaattccacacaatttcaaaaagcaaaacttgaatatatcccataccgagcgctatcttgaatccatgtgaaggaagttgtatgtgggcattgcattaggaattataagtaatctaggaatgacttaaaagtgtactggaggatgtgtgcaggttacatgcaaatactatgccattctatatacggaacttgtacacctgtggattttagtgtccatgggaggtcctggaaccaattccccataaatccaaagggacaactacatgtgagtctatactgataaaaataaatgattatgttctcactcataagtgggagctaagctatgatgatgcaaaggcataagaatgatacagtggatactggagactcaggggaaagggtggcagggaggtgagggataaaagactatacactgggtgcagtgtacaatgcttgggtgatgggtgcaccaaaatctcagaaatcaccactaaggaacttattcatgtaaacaaacaccacatgttccccaaaaacctattgaaataagaaaagaaacaaaaaaaacagggaagaaaaaaaatacaaataaatgattgaacaaataaataaatgagaaagaaaagacagatattccttacagaataattccaaattatatatatatagatcctcccctccctgctactgttttccccatttcctacttttttctttttcttttttagagacagggtcttcctctgtcacccaggctggaatgcaattgcgtgatcatagctcactgcagtctcaacctcccaggctctcaagcaatcctcctgcctcagcctcccaagtagctgggaccacagtccaccacactctgctaattttgttattttttaagagacagggtctcactatgttgcccaggctggccttgaactcctgggcccaagggatcctcctgcctctgcctcccaaagtgctggtattgtacacttgagccaccacacctggccaccctactcttgtcttcagaaacatctagccaccatcaagcttactgccctcccaccttgagtatgtgctggatgtttcccaagaaaatagtagggaaagggaaaaacagtagagaaagccaacacagatgacactaatcaagtgataagtgataaccagtgcctagacattgatgtcacagggtcctgcacttccagggtgtgttccctaaaatcctaatcccaatgtaaatattatgagaaaaaatgccaaactcagcttggtgggcatttgacgatgtccaccacctcaacactaccaaggccataaaaaagcaaggcaggactaagacagtgtcacacaccagaagacatgatgaacagctgacagctggagctcattgcttggcacctctcaaccaagagcccttaccagacatgaatcctgttttgtacaaggttctaatcaaggccaaaaaccttgcattctacctttgactctgcagcttcagcaaaccttattctgtcactactgactcagagaaaaggtcagccaagaacctctagccaaaaactgccttattctgaactgacaaagtactgaaaactttcactttatttaactaatacaaagcaatttaataagcaaatatacagtaagtatctgtaaaagttcttgttcatagactccagaggccaggcacagtgactcatgcctgatgagtgtctctcccagcactttgggaggctgaggtgggaggatcgcttgagtccagaagtttgagatgagcctgggcaagatggggaaaccccatctctacaaaaactaaaaataaaaaagttagccaggcttggttgtgcacacctgtggtccctgcgacttgggaggctaagatggatggcttgagcctgagaggttgaggctgcagtgagctctgattgcaccactgcaatccagcctgagcaacaggagactctgtcttaaaaaaataagaaaccaaaataagttttaaaaatatgtagtttatagactccagagcaatggggatgtcccttcaattcatctaacagacatttatagagcatctactttgtgttggtcctggtctgagccctgaggatgtagcagcacattggagctcctcatacatctatgggtagggggagataatcagcaaatggaaagacacaggccttttcctgccccactgtgagacctggcacaggtataaaagggcctcaaatggggcctgacgaacttgccactggcaccatgaagctggctcctactttcgggctgctcttcactgccgtgctcctgatctccagggcaagtaggtgccaggctgtgaatgcctggggatgtggatgctggggctttgatggcatccaagggcagttttgagcatacatggagggaaagggatgtgtaggctctgatgagtgtctctcaagggtctgtccacgtgtcattgtgttccagattgtgacatctgcccagttgtgacaaaggatgttgatctcttcctggtgggaacccctgatgaatatgttgatcatgtggcacaatactgaacatcctcattaatattgtccaatgctagaaagctgaagaactgtttcaatggcaaattggcagacgaggacaagaggcatgtgctcagtgggctggtgagtgcagctgtgtgtgcctgcaccttagtctgggtggagggtctgctggttctagggcagtgggtgggagtgcttattctcctcccaccaacttaccattatgatatgtaattgagactactggaaatagatttacatgtgaggtgtgtagcaacagtaaaatgtattttaataaaaggttataagaggcataaaaatataaattcttgcctagggttaaagaattgttttaaattagaaaatatgaagttaaaagttcaaacaagtggtagaaagtgtaaaaataaatcttgcaaaaattctatgtatgaatatattgactaaattcaaaagggtattatatggtttttctctaaattcagcattaaaataagagcatgacaaggtactctcccaccaaggcctttccctgggaatctgggaggaaaaggaacctcgtgaatgaggaggtagagaggagggagcagacaccaatgacgcagggaagggccaggaagggggattcagctagcccttgagcttgtgggctggctctggctgttcagctctgtaggctagcctgggaacctccaggacctcctgtgtccatggcaccactcaacctcaattttagacccttggctctgacctcctggcctacagcctctcgagcacatgagactctccaaaccatgagccctgggtctttctaatacaggatttattaagaaattatttttaggcagctagaaagggtaaaagttctcggtggaattttcctttaataaaaagcagccccaaaccatttcttctccgacagaaagcagcctgatatatatgaaaactaggagctttcatatgtaaatgccagcagcggtacctggaagccaggtacattgaatatggtggttcctgctctccttttccttgtcaccgtgtgtgtaggaatcatggtgacccaccaggtagaaccacatttgcataataaaagagtagggtgggaaggccagtctttttgcaggctatgcaaatggaacgtctagtcaaaccaatcccctgggccctatgtaaatcaatcaccacctccctaagcctctgcacaaaatcgattgcatcctgctgcaaactggagaccctctcttgggcgacctgctttctcagcatgaggaagccttttctctctcttcttcttctttgtctattaaactttctgctcctaaacccactcctcatgtgtattcgcgtcctgaatttttttcgactgagacaaagaaacagggtatataccccagtcaaccaagctgtttcatctggcggttctcatccaggatcaggatcagaatggaagatagaaacatcggactggtgagtatggagtgagcctcaaatctgccctttaatctcaaggctgtcttcaaaccagtttttttttttttttccacagagttcctagccatcacatgaggctgggagaagtcctagggcaactgagaatttctgtccagggcacaccctggcattattcaaaggcttcgggactgaacccagcctccaacagcccatccaagtgttgatcatggatctccagctatcctgtcacaaaattttcctttcttttctatctgctgtcactatgtctcctatcctctgtgtgtgcagtgtgcaggaaattttacagttcagggaaacagttctgttaggaaagatcagcaaacaccacgtgcagcaactcaacaagcatctctatcctgcctctggcgagcacatgttatttctaagccaacagcgccacctagtggaaatataaatcctcttcatgtggcaaatcgccggtgttttacagtaatactgcagcttctcaattctttctttttgcaccgctagaaatcagcctctaaggtctttctgtgaatgggaaagctccaacttcaacaattaggaggaaaatgtccttcacagccaaatgttagcgcccatactgtgccaacagcaggaaaaatcaccattaggtccctacgttcatttctgtctccaatgagagcagtacttaattagtaaagtgattttaagtacagaggttaaacagaaccattttgctatgggtaaatattttagcacaggccataatagcaggtaatttagcacactgactctgttaaagaaggcttgcccaaaggggacacagtctctccagagatccatttcttcaggaagccaggcagatcacacagatcgataagctaaggcagtgtgggtaaagcatggttaatcccataacttagttcataaggttccatgacttggaggaccacgcctacaacaatgggcagcacagttaacacaatgctgggacacaggaaccaaggagagaaaactgttggggggatgctcccactgtcttcctctccaccctaggtcacagtgaaaggacacctagggagtagaaacagagggacaaaagaactacagggcaaacaaaaatgttaacaaaatggcaatagtaaatggtaggagacttccacatgtcacatttaataatagacagaccatctagacagacaacgtataacagacttaaacaaaatcatagaacaaatggatctaccagacacacacagaactttcctcccaacagcggaagacattctcctcaagaatacacactacagtctccaggatagaagacaagttaattcgaaaacaagtcttaacaaatttaagatcagaaccatattcagtgtcttttctagccacggtggaatgaaaccagaaatcaaaactggcaagaaaacagggaagtttatatatatgtggaaaaattcaaaatttcttgacacaattgctgcacttctgatcaaatggctcttgcagatatttatagactatttcatccaacagctgcaaaatattatttctttccataagaacatttaacaaagaatgagtatttgataggaaaacaggatgactatagttaataatcatttaattgtatattttaaaataactgaaaaagtataatcagattatttgtaacacaaagaataaatccttcaggtgacggataccccattgactctttttcttttttttttttgacagagtctagcactgttgcctgggctggagtgcaatggtgcaatctcggctcactgcaacctccgcctcctgggttcaaatgatctcctgcctcagcctcccaagtagctgggattaaaaatacaaaaaataaaaatttttgtatttttagtagagacggggtttcactatgttggccaggctggtcttgaactcctaaccttgtgatctgcctgcattggcctcctgaagtgctgggattacaagtgtgagccaccacacccagcctcccgttgactcttatgtgattattatacatcgtttgcctgcatgaaaatatcacatcaagtatcatttctgaccacaatgaagtaacactataaatcaaatcaataacaagataaattttctaaaatgaacaaatatataaaaatgagacaatgagcaaataaacaaattaagaagcaaattaaaaaaatttttgaagcaagttaaaatagaaatgccacataccaaagcctgtgtgatccagcaaacacaatattagcaagaattttgataataaatatcttcatcaaaaatgtagaaaaagttcaaataaaacctgcacaacataacaaaatctatagggtactgaaaaggcaataataacaaggtagtttagtagtaactacctacatcaaaaaaaagagagaaagatttcaagtaaaacttaatgcatttcaaggaactaaaagagcaaatacaaaccaaacccaaatttagcaggaggaaagatataataaagatcacagcagaaataaatgaaattgagactaaaaaatagtatagaagattaacaaatgaagagttggttttgttaaaagaaaaaaaatcatcagaccattaactagattgtgaaaaaagacccaagtaaataaaaccagaaatgaaatagtagacatcacaactgataccacgcaaaaacgaagtatcattagagattgctaccagtaactataagctaacaaattagaaaacgtaccagaaatgtgtaaattattagacatataaaatttaccaagattgaaccaagaagaaatagaactcctgaatagagcaattacaagtaatgagattgaacctgtaataaaatgtctccatcaaagaaaaaacccaggctccattttcttccagaattgtacaaaatatttaagaactaataccaattcttcaaaaagtcctccagaaaattgaagggaatgaaattcttccaaactcattctacaaaaccagcaataccctgatggcaaaaccagacaaggacacacacacatacagaaaacaacaacaacaacaacaactataggccaatatccatcatcctcaacaaaattctagcaaaccaaccccaacagcacagcaaaatgatcattccccatgatcaagtgggagttctcccaggaatgcaaggatggttcaaaatacacaaatcaatacatgtgacacatcacatcaacagaaggaagaacaagaaccatacaatcatgtaaatagatgcagaaaaagcatctgataaaattcaactgtgcttcattataaaaactcttaacaaactgggtgtaaaaagaacgtatgccaatataataaatgaaatatatggcaaacccactgccaacatcatagtgaataaggaaatattgaaacgtcattctctaaaatctggaacaagaaaaaaaagtggccactttcaccagttttattcaacatagtactggaagtcctagccagagcagttaggcaacagaaagaaataaagtgcatccagactggataggaggatgtcccagtctctgcttgcagatgacatggtcttgtatatagaaaaacctaaaaggaccaacaaaaactcttagaactgataaagaaattcagtaaaggcacaggatacaaaatcaacatataaaaatcagtagcattcgtacacatcagcaacaaattagtaaaggaagaaattgagaaggcaaactcatgtaaaatagctaccaaaataagaataaatttaacgaaagaggtgaaagacctctacccaaaaagctataaaacgctgatgaaagaaagtgaagaggacatcaaaagtgaaaaggcatcccatgttcatgattggaacaattaatgttgtgaaaatgagcatatcaccaaaagtgatctgcagattcaatgcaatccctgtcaaaatatcaatgatatcttcacagaggtagaaaaaacaatcctaaaattggtaagaaaccacaaaagactcagaataaccaaagcaatcctcagaaaaatgaactaagttggaggcataacacttcttgaagtcaaaatagattatatagctatggttaaaacaaaaacaacacaacaacaaacagttgggcatggtggctcatgcctgtaatcccagctcttagggaggcagaggcgggaggataccttgaacccaggagttcgagacctgcctgggcaacatagtgaaaccctgtttgccacgaaaaggaaaacaaaagaaaaaaaaacagtatgatactgtcataaaaatagacacatagtcaatggaactaaatagcacagaaataagttcacatatttaccatcaacagattttcaacaaaagtgccaagaacatttattggggattggagagtcttttcaataagtggtgctgggaaaactggatattaatatgccaaaaatatgaaaccagacatccatctctaatcatatttttccttaaatcaactcaaaatagcttaaagacttatatgcaagagctgaaactataaaactactagaagaaaatatgcataaaaattttcaggacattggtcttggcaaagattttatggagaaaacccaaaagcacagacaacaaaagcaaaaatagacaaatgggattacattaaactaaaaagcttcagcacagcaaaggaaacaatcaatagagagaagagatgacttgcaggatggaaaaaaaaatatttgcaaactattcatctgacaagggattcatatccagaatatataaggaactcaaataactcaacatggaaaaacacacaaataatctgatgtacaaatggcaaattagctgaagaaatatctctcaaaagatggcatacaaatggtccaggtatttttccagtggtcagcatcaccaatcatcagggaaatgcaaatcaaaaccacaatgagattcatcttacctcagtgggaatggctattatcaaaattgcaaaagataacagatgctagtgaggaagcaaggaaaagggaaaccttgcgtactgttggtgaggatgtaaattaggatagccattatggagaatgatatggagatttctcaaaaaactaaaaacagaattaccacatggtcgagcaatacaattactgagtatacatccaaaaaaaagaaagaaaattagtatatcaaagacatatctgcactcttatatttattgaagtactattcacagccaagatttggaatcaatctcagtgtccatcaacaagtgaaaggatgaagaaaatacagtatatatatgcaatgaaatactgtttagccattaaaaaatcacaaagttctgttatttgcatcaacatggatgaatttggagccattgtgttaagtgaaataagccaggcacagaaagataaatgctgtatgttctcattcatacacggaagctaaaaaagttgaactcatagaaggagagtgattactgatacaaaatgcaactaactagataggaggaataagttctagggttctatagcactataggatgagtgtaattaacaatgtattgttaaagtactgataattctagtaatgttgtaggatacgaaatacacatacaaaaatcagagacatttctatacactgataatgaactatccaaaaaggaaaataagaaaacaattacatttgcagtaacaacaaaaagaataaaatgcttcaaaataaacttagccaaagaggtgaaatacttgcacactgaagactataagacattggtaaagaaaattaaagaagacatatatcagattctatgaatcccaatggcattttttatagaaacaggaaaataatcttaaaatgtttatagaatcgcaaagaagcccaaaaagtgaaaacaatcctgagtgagaagatgaagctggaggtatcaacctaaaaaatgagagaaaacatttgtaaaccatatatttgataaggggttaatatccaaactatataattacctgatacaactcaacgcaaaaaataatccaattaaaaatgggcaaagacctgtgtaggcatttttcctaaaaatacatacaaatggccaatagctgcatgaaaagatgttcaccatcacgaatcatcagggaaatgccaatcaaaaccacaagatgccatctcacacacattagcacggcttctaccgaaaagacaagaaattataagtgtttgcaaagatgtaaagaaattgaaacccttgtgcactattggtagaaatataaaatggtacagcctttatgaaaaacagaatggagctttctcaaaaaattaaaaataggctgggtgcattggctcacacctgtaatcccagcattttgggaggccgaggtgggcagatcagctgagatcaggagtttgagaccagcctggccaacatggtgaaactctgtctctactaaaaatgcaaaaattagccaggcatggtggtgtgtgtctgtaatcccagctgctcgggaggctgagacagaagaatcacttgaacccgggaggcaaagtttgcagtgagccaagatcacaccattgcactccagcctgggcgatagaacaagactctgtctcaaaaaaaaaaaaaaaaaaaaattaaaaatagaactactgtatgatccagaaatcccacttctatgtatatatccaaaaaaaataagatcagtgattggcaccccaaggttcattgtggcattattcacagtcaccaagatagggaaagaacctaaatgtctgtcaatggatgaatggataaagaaaatgtgatatatacaaaagctatctatctatctgtctattatctatctatctatctatctatctatctatctatctatctatctatctatgtatctatcatctgtgttttacaaaatatacaatggaatactattcagccttttaaaaaagagggaaatcctgctactttcaacaacatggatgaacctggaggacattagtgaaataagctagacgcagaaagacaaatcctgcatgatctcacttctatgtgaaatctaaaatgataaaactcatagaatcagagagtagaattgtagttgcctggggccacaaagtggtggtgggtgggatgagtgagaagttgtcagtcaaagggtacaaagtttcagctatgcaagatgcatgagctctggagatctaatgggcagcatggtgaccatgattaataatactgtattgtatagaagaatcccctttatcctcaggggatacattctataactctctgtgaatgcctgaacccatgcatagtactgaaccttctatacaatatactatgcttttttcctatgcgtccatacctatcatagagtttcgtttataaatccaactgagtaagaaattaacaggaactaattataaaatagaacaattataccaatatactgtagtaaaatttacatgaatctgatcagtgtctctctctgaaaatgtcttattgtactgcctcaccaatgtttggactctggttgactatgagtaactgaaactgcagaaagcaaaactgtgaaaaagggaggagccatcatacttgaaatttgctaaaaattgttatcttaagtgtcctcaccagcaaaaaaaaaaaaaaacaaaaaaaaaaaacctgttttctacccctcaaaaaatttcttctgctgttcctttgtactcaaataatctcctcacccttaatcattagtggccactggtgtgctcttatccctatagctttactttttccagaattgctaataagaaaaaccgtgcaatatgtagcctttgagtctggctgacttcaatacctttttgttttaaaattctaaatataatcaaatctatgatgaatatattaattaccttgagtatggtggtcacttcaccctgtaaatatatatcaaattataaagccatacattttaaatatacacaattcctatttgtcaattataccaataaagccagaggtaaaaaagaaatcttattatctagttactatataaaaatatattaaatatattgccacataaaaacctgattattttttattttttatttttttatctcttttttttattattattatactttaagttttagggtacatgtgcacaacgtgtaggtttgttacatatgtatacatgcgccatgttggtgtgctgcacccattaactcgtcatttagcattaggtatatctcctaatgctatccctcccccctccccctaccccacaacagtccccggtatgtgatgttccccttcctgtgtccatgtgaagaacctgatttttaaaaaataaattgggtaatcttatttccagcaattaaaacatctgaaaaaatgagtattaataaagatacttgatacctttagtattttaagattataggtagaatttgtcaatgaggaaattattgaaagaagccagactcaaaaagctacatagtacatgatttcattgataagcagttctggaaaaagcaaggccattggaatgaggaacaagctggtggccactcaggattaagggcaaggagaccacctgactacaaaagcacagcacaaggagcgtctgaagttaggaaacatctctactgttgtagaagtgcctacgactccagacacccgtacaaaacctacataagacagagttctcaaaactcacggaaatgcacatcaaaaagagtgagtttgctgtatgtaaattttttaacatttgaaactcaaaaaaaggtatgaagtattcatactcataagaccaatgaacctgaaagattataagttctgtgaaggaatcagatcaaaaacagtgcatgctctatgagtccatgtacatgaagtgctggaaaatgcaagctaatctatactgacagaaaccaaatcagtggttgcccagagagaaggaaggggacaaggagaggcaggagagaggcacttaaagaggcacaagaaaactttcacaagggataaatctgttcatattttgattgtggtgatgatttttctggttttcacaactgtcagaagttacaaattgtacattttagatatacatgcttcttatatgtcatttatacttcattaaagctgttaaaataaaaaaattaaataaacatatataagatttaaaaatacaattaggaaaaacttaatagaataaggcatgtaataatggaggaatatgcatttttaattgcatgtggatgattaataaaaatgaccacttattagaacataaagtagctctcaacaaatttcaaaggattttaaaatttccagaggatataatttgatctcaatgcaattttcatagaaatcaataacaaaaagtgattgcaaactcttcatatttatagaaattaatgattcaattggctcacttttactgtcacaaataacctgaaaattcaatagattaaaatgacaatcattgatgatgatgacaatcattgatccctcatgtgctgtgggttggctgtgtgatatcctaccttgttttaacctgaaattgactctcccttagctgagagagccggacagactccattttggctccttcacttgcagccccttacctagccccctttcttcaaggacttaacttgtgcaagctgactcccagcacatcaaagaatgcaattactgataagatactgtggcaagctatatccgcagttcccaggaattcacccggttgatagtacccaaagcccccgcgtctgtgtccggttgatggtacccaaagcccctgcgtctatcacctcatgatagatttaaagcccctgcacctggaactgtttttttttcctgtaaccatttatcctcttaacttttttgcctgttttgcttctgtaaaattgcttcagctaggctccccctcccctttccaaaccaaagtgtaaaagaaaatctagccccttcttcagggccaagagaattttgagcactagctgtctctcggtcgtcagcaataaaaggagtcctgaattagtctcagagtgtggcgtttctctacaactcgcctggttacaacatttggaggccccagtgagatttcaccactgggtgagtgctggactcgttctgggctacccccaacagatggcgggcttataggggaagcgcaacctgaagatgttccagcgccctgtaggccactgtcttctggaggggaatggatcgactgccagtgtatgcccaccaaattcaactcctgagtcctcagtctctggtcccaggaaggtgagtcagatctgactttgtttttctgggagggaaacagccgtgacgagggccctccctcagactctgtctacgttccaggatgctggaggacagagtcctggtttctgtctgtcttctctgttaagactagtctgtctgtctgtctgtctgtctctctctctccctctctctccccctctctctccctctgtctctctcccttctctttctctctctctctctcttttatctcttctccttctcttgttcaggtctctaggagacctctgttttagaacaggaataagaattgtaataaactctgtatgagtgagtgagtgaatgtggagttcaagggcttgcgcttgaatttccagtttgtagctccatggtgaaagctatggagtttgagtgggccctcacctgcagttccatggcgacctcataaggcttagggcagcatcaggcatagctcgatccgagctgggggtttacaccggcctgccaatgccaaaaggagcctaagtcctctcctggggagcggccaggcgggcatctgactgatcccatcatgggaccccctccccttgtctgtctataaaaattgctatactaatttatataccccagtgtctatttttctgtttggtctgtctaaatttcgtatgtcaggtcgccgatactgcccatggcgattggacaaggacttcttcaaagtcctcggtacagattttctatcctgggaggaaaaatctctcattagtcattttggctgcccatcccagtcctgccttttctgtcagaaacaaatcaggtgttgttatggggaggggtgtgagaaacattcgcccgtttgggatttctggcaccataaaggttgctggcatttggattgccataccccatgccccaatgactggaccacctcctccttagaccagtggtggattcaaaatagccaccccgcagacctccttgctcaccttttctgtcatcccataacttttcctgtgcccttggataaggcactgtgcggagaaacctgtgcccgtgctgctttactccgtctgcacccttattctattcctctgtggctactctcctaccttaggaaagatctgagtggcccctttcctcctcatccccatcccttacctcacatatcttgtttttctgtgtcacagccagtccagtgcctccaagagttggctctgctctccctcctaaaacccttaaaagaaaaggccaggtttgaactttttgccttcgaatcgtggagacaccaaaaatatttgggctataagtcaaagaggagagggggatcacataggtcccactggcctcggagccacctcttgtcctccccctagatctgaaagattaaagagacagaacttatgtggcaagaagtgttggctgtaattgatttcctacttcttctggttagaatacttttgttcttccgatattacagccccccaggccatgaatttctctgtccatgctgggtttaatatttctgctaaaaccttgttaaattgcctccagaatgggaaactcttcttcccggcctcataaagattggagccctctctaatgtatgttacaaaatttctccctgggcttctcagaggattatggggtccaccttaaaaaaggcaaactcctgacattctgtgaagtagaatggccacagtttggaaccgggtggcccccagaagggtcactgaatctcacagctgttcaggctgtgtggcgggtcgttgctggaactcccagtcaccccgatcagtttccctacattgatcaatggctgagcttggtctggagccctctcgcttggctccgctcatgtgccattcataatcttacctccaaggtccttttgagccaggcctcactgtcatcccaacccttggccccctcggctcctcctgtattgcctccttctgaagaagaggaaagtttttctcacgcatttctgctgccttataaccttcctgctccctcagaatcttccctagtctcctcgactacatctcctttgggctctccacctattgcctcctgattgcggctgcggcaggaggaggtagcccccctcctcctgctgagagaggcacaaatccctccgggtgatgagcgctcagctccattcttggtttatgtccctttctttacttctgacctgtacaactggaaggctcataatccccccttctctgaaaaaccccaggtcttgacctcattgatggagtccgtgctccagacccaccggcccacctgggatgactgttaacggctccttttaactctttcacctctggagagagggaacgtatccgaagagaagctaactgttacagtagctgcagtctctccaacaggtacaagacagcatccagctgcttgtccaaggagcacatcccaatgcagttcctgaccagatggggctctgccactctttccagctgggtgacctggagtatgttaaaaagttccagaaggaaggactcactcctgcctggaaaggacctcatactgtcatcctcaccacgccaacagctctgaaagtagacagcattccggctggattcatcactctcgcatcaagaagaccaacaaagcccagcaagaaacatgggtccccaagcctgggacaagccccttaaaactgcgcctaagttgagtgaagccattagattaattctttatctcttttgtttccacctgtcatgccctctgctccttcctactcttttctccttacttctttcacgacaggactgtgtttgcaaacaccacctggaaggcaggaacctctgaggaagtcttttttgcagtgatttatgtgctctgttcccagagcctgcccatactctcgaagagcaacacaatctgccgatcataggagcagggaacgttgaccttgctgcagggtttggacactccggaagccagacaggatgtgggagctccaaaggtgcagaaaaaggactccagaatgttgacttttacctctgtcctcgaaatcaccctaactctagttgttgagattcttaccagtttttctgccctgactggacatgtgtaactttggccacctactctgggggatcaacccgatcttcaaccctttccatagcttgtgcttcctgtcctaaactgtggactaagagaaattgtaatccccttactataactgttcataatcctaatttagctcaatggaattatggcatgtcttgggattaaggctttatatcccaggatttgatgttggaactatgttcaccatccaaaaaaaaaaaaatcctggtcccatggagccctcctaagccaatcgggcctttaactgatttaggtgaccctgtgttccaaaaatacccagacagtgtcaacttaactgtcccgccgcctttcctggttcctaaacctcagctgcaacaacaacacctccaacccagcctgatgtccattctgggcagggtacatcacctcctcaatctcacccagcctaaactagcctgagattgttggttgtgcctaaaggccaaacccccttattatgttggattaggagtagaagccatgcttaatattgactctctttcttgtcatacatgcccctgtgccctcacactaggagacgtgtccgggaatgcttcttgtctaattagcactggatataatttatctgcttctccctttcaggctacctgttatcagtctttacttacttccttaagcacctcagtctcctaccaggcacctaacaatacctggttagcctgcacttcaggtctcactcgctgcatcaatgggactgaaccaggacctctcttgtgtgtgttggttcatgtgctcccccaggtctacgtatacagtgggacagaaggacaacttctcatcactccccctgaattgcataccaggttttgccgagccgccctactccttgtacccctcctggccggcctaagcacagctgggttggtagccatcagcatggctgccttcattcagggagaaactggactaatgtccctatctcaacaagtagatgctgatttaagccatctccaatcaaccatagatatactccatacccaagtagagtctctagctaaagtagctcttcaaaaccgctgaggcttatatctgctatttgtctctcaaggagggttatgcacagctctgggagagagttgttgcttctgtgccagtcagtctggggtcataaaagatactctccaaaaagttcaagagaatctagatagacaccagcaggagcgggaaaataacacccccctggtaccaaagcatgtttaactggaatccatggctaactactctaatcactgggttagctggacccctcctcctcctcctattgttaggcttagtcttcgagccttgtatattaaattggtttcttaactttgtaaagcaatgcacagcttctgtcaagcttatgtatcttaaagcccaatataacccccttgttaaaactgagtaatcaatgatttgattcccccaaaacacaagtgggaaatgtgatatcctaccttgttttaacctgaaattgattctcccttagctgagagagcgggacagactccattttggctccttcacttgcagccccttacccaccccccttcctcaaggacttaacttgtgcaagctgactcccagcacatcaaagaatgcaattactgataagatactgtggcaagctatatccacagttcccaggaattcacctggttgatagtacccaaagcccccgtgtctgtgtctgttgatggtacctaaagcacctgtgtctatcaccctttgatagatttaaagcccttgcatctggaactatttttctttcctgtaaccatttgtccttttaacttttttgcctgttttacttctgtaaaattgcttcagctaggctccccctcccctttctaaaccaaagtataaaagaaaatctagccccttctttagggctgagagaattttgagcactagccatctctcggtcaccagcaataaaaggactcctgaattagtctcagagtgtggcgtttctctacaactcactcggttacaacagctggtgtttcagctgatataagctggtcttggctagatagtgaacactcaatctgtgggcctgataggacttgacccctcctgtaggttgggctcaaatctgatccacatctattcattcaggggctaacacctaagaaccagcacttctaggggaaaggtcttctcttagtgaccacaggaatgtgggaaggaaagactaactgcatggtcctattgaagcaattaactgcctattgtctgctaacatcccattgtccaaatctagggacagcaatggagtgaggggacttgggggactgcgcctgaactgggagggcagtgagtggagtatggacactgagtgactacatgattaggatcatgtagaagactgtgtggcaatttagcggcacaaagtaaatgttgtggaacattaacttaatctactaccaactgaaaaacttatggggagggagacattaaaaagaaaaatggaaaagacacaaataatgaataaattaaaaggataccaccttaaagatctttcagccattaaaataagagtatattcaggaggctgaggtgggagcattgcttgagcccaggaacttgaggctgcagtgagttatcatcacacctgtgaatagctcctgcactccagcctgggcaatatagtgagagtttatctgttaaaaataaagtaataaaacattttaaataggatactatggaaactttatgtttacttttaaaattaggtgagacttttaaattccaagaaaaacattcaaatactgacatgagaagatagagaaaccctgaatagtccttatgggtgaactgtgaacaggaggcctaggctctctcctatatgcaatcctaggaagatgatgttgcttttattttcctcctgcactgtttccttagaatggacttagatcaatgagaaatgctgcatttcaggcattgtttattgtgaaagctttgcctggggaactgcacctgaactgggaaggcagtgagtggcgtatggacactgaatgatgacatgattgggatcatgtaagagactgtcaggaaagcaaggttttcctaaactaacatggacatggaggtgtcctccaatttgtaagatgttctggatcagacagtgatacctgaacatttcaaggtgaacctcatgcacattaactttaattcccatatagctatgctactgaatggtggtgtgaaatgctagactgctgctgctggacatctctcaccccaccaataacactgaaaatactgatcatgctttttctttgtcctttcataaatctaagttaatttagagtcaagtgaatgcctattgtgttggtgagttttattgcccataagaatttgcaactgttgctggtggccatgcagtcttctaattgtctatgaaaccaaattaaaattttaaaagcttttgcaaagaaaatcccaggcagatgactttttctggaaagttctagcaaatacttaaggaggaaaccactccaatcttatacacattcttccaaagaataaataatgatggtaccttgtctgtatcggtcagtgttcctgcaggaaagaaatggcaaactcacactggacacctgaggagagtttaatgaatggctcttggctctggtgtgagcaaagtcaagggaagtcgataagaaaacccctggccggctgtggtggctcacgtctgtaatcccagcatttttggaggccgaggagggcagatcacctgaggtcaggagttcgagaccatattagtcagatatggtgaaatcctgtcctaaaaatacaaaaattagccgggcatgttggtgggcacctgtagtcccagctactcaggaggctgagacgggagaattgcttgaacccgggaggcggagattgcagtgaatcaagatcatgccactgcactcaagcctgggcgacagaggaagactctgtcaaaaaaaaaaaaatccaagtctagaaaaagcaaaatacccaaagggagacaaagaaaaagagctgttccaaggatgcagtgagacctgcaactgcaggagaggtcaagctcatgggacctttggccatcagtagagggaaacagccactgccaacctgcagccctaagggaagtcagctgggaacaaatcacttcatctcactctcttcttccttcccatatgtcctgccatatctccaatgtgtcaacacccccccaaaaaagggcaacgtagcccaatgatgcaatccagaaaaggccatgttctggtatacggaacaggttgcggaaagggtagactagatttcgcagaataaatggaaatcaccagtatactcctcagttcatttaatgaggctgctataatcctgacagtgaaatccaaccactcagggacatagacaaaattttccacacaagatattggcaaagtcaatgagattatatataaaataatactacatgctgattaaggcagatctataccagaaaagcaagccaggtttcatattaaaaaatcatttgatatactttaaaacattaacagaactaagaaaaaaaaacatatgcacatttcattaaacgtaaataagatgtattataatattcgtcatctttccttgtttaaaaaatgttctcaggccgggtgcggtggctcacacctgtaatcacagcacttttggaggccaaggtgggtggatcactggaggtcaggagttggagatcagcctggccaacatggtgaaatcccgcctctactgaaaatacaaaaattagccaggcgtggtggtgtgtgatggtagtcccagctactccacaggctgagaaaggagactcacttgaacccaggaggcacaggttggagtgagctgagatcgtgccactgcactccagcctaggagacagagagagactctgtctcaaaaaaaaaaaaaaaagaaattaaaaaaataaaatagaaatagaataatatatccttaatctaacaaagcatctaccaaaaattcctaaattaaacttcctatttaatggtgaaatatcaaaagctatccttttgaatccggatgaagcgtatccagaaaagaaggaaagaatagggcaaggaggaagagacaggagaggacagcggggaaaaggagggagtgtgagctgcacccgtgtaacctgcctgccccagctcctccacagccaggctgtcctccccacccaccccgcccctccaccatgggtctctctgctatgggaccactccccgctcagcaggctctcgagctccagcccctctccaggaaatctcatctcccaaaactctgcccagaactctaaagtgaagccagagttgagggagctcctcctccagtgtcaacctggctcccacctcccagtgtgggagaaaagcaaagcgggtgagctgggaggagtgcaggctttggggacaggccattctccaggtgtcagcctggccgcagggccaatggtgcctggcagagaaccacagggctcagtaagcagaggccacgcaagccctaaggtcagatttgagtaggagccagtgtggccaggtgggcaggggccctggttgaggtgaccagaaatcccatcagcaccactgggtctcttagaagatactcaagttcccaaaacaactgggggttagaggcaggggattagtcagacctcaccttggacagcagccccagccctgtctcagccccagggacaccagggcatggggctgtcacaaggaagctggctgaaggccaggtgcctgtgccttgactgagggacacggctcaggtcagtttgctccatgactcctgggaccctacagaccccactccgtgttctcctgcagcccagtgcacagcacgctgctctgctgtgccaggttgtgttgtgttgagttgtgctgtgtcatgtgctgtgtcactgttcctgcagactccctgtccgggagctctagggccctgacctctaagaagccccagccccgagccagcctcaggcaaggtctgcatccctgctgcctccgcttccctggctcagccttgaagctcccgctgacccctctgccactcaccaaccacccatcaccccctacttagaggccaggaagcagcaggggtcgtttcccccttctcttcaccctttctctcttccctccattctccaggacatacaactccaacagaaaccagaaatcctgcaaatgccctgacccacccaccaaccccagggcacctcctgcccaggtatttggcacaggggatgccctcacaccgaccccatcatgtgccctcgtggccccgaggctgtagcatgggatgcctgtctggccctggacctgccctgggccctgccctctgccaccgctcacaggacaaacccaaacaattgctgtcctccctctgaaatggtggtcatgggggtgcagggaaggcctcacgtccctcctgtgcccaggcccctcaccccaacactctggctggctgcatctgctgcccagagcccttggtcaccaggcgtgcagcctggaccacgctgatggcaagggaggcccttcctaagcctagaggtggtctaaaccttcatggaactgctggtcacagtgccagccagagtcccaggtgacgctgagatagctcaaagtggtgcatgggagatgtctgatatcaaccctctcctggaggtagatgatgtctccagcctggtgacttccctggcctccagccaccaccacccccagtgtccccaaggctgaaggtgcaagcttgccctggccctggtcctggcatagaaagtgcacgatctggtcatgtcatgcaggtgaggatacttgtgtgccaggtaacctcaggcaggcatggtggcgcttgtggggcaatcctgtaacctgcagtgtggtgggtgggatgggtgtgtgtgacacaggcaggaactactcctgatggcagctgacgacccacatgtgtactgggtgggtgccaatgggagtagcaggtgagtggctgagcacaggcaggtgaatgagtgacagctacacaaaccccaccactgagcacgtccctcccagggcaaagcagatcagatcacaggcccagccctgggaggcccagaggagcctcaggtcctcaggaaggctcctggccctcttcgccctaggaggaccccccccccgccccaagccggctccacctgtagctgtgggcgtgggagggagacagagcgctctggcggccagagaaggaaggaagatggagggagggcggacttctgctccctgacgctgctgctaggccccctgcggccctcctggagcccacacctttcagctgcagtctcccagccttcgtccccaggacgaagcccactaagccagtgcttttccactgcagctggctgttccgcttggggagggttcccagattgtgcaaagtgaggaagggtcccctgtccctgccccgcagggcccccactccaggcctcccccatctctccctgtctctctcagaggtagaggcagcattaaattaaaatttaattaaaatattaaaaataaagtaaaaaattcaaatatacaacagtagactgtctggcttgcatacaaagaaggccattgcccctttgggtgagccgggcaaggtcagggtctaagaagcgcctctggtgagaagcggttgtcaggctctgatggctgcgggaggagtgactcctcccaggatgagggtctgtgtcctctcagtgctcactcaagttccgtatttccaagtccttccagggggcgtaacgcacgtgagaactgccatttctgtcacagatacgtggccgcatgcatttccaggaaatgtccttggttcgcgaactacagctggcacaatccagcccagggcgttctgtgagctgtagtctccagcaagtgaattccaaaaaaacctcaaagacctcaaagaccatacagggtggacagcgtagtagcagggtttgggaagagaggagctcttttgctagcaaaggcgagagctcgcctggtacaaggtctgcccacgtcccgggagataaacattagtgtgagcgcacgctagacccagaagagtttgccacggccgcacggttttctgggaagtgtagtttcttggtcccggcgccattgtccttaaaagtagagggtggcccttggttccgaggtgtatctttcacctcatcagtatgactatatgccccaggacacttcccgcatggtcctaactgccgggctctgggacgacagccccaggcggtttagttttttaggaaaccgagatctgtttgcccgcggcgccccaggtccgcgcggccgcagagactcctgggaagtgtggtcttccggtacctgcggttcgttgcgcctggaattttgtcccctgcgcggatgattctgggaaatgtcgatcggctgtgggcggcgcactgggtccgccccgctgtagcctcaggcctgacggcgactcccaggctccgggacgattctgggcagtgtcgtccccagaggtcggcggccgttgcccgctcaccagcgacgcggggcgcctgcggggacggtgaggccctgctgaggactccggccagtatgagtcccgggggcggcggcggggctcaggccctgggtctgccccgcggtgtgaccccggccggtgccttggttttcctggccttcatgtcctcctatgtaaacgcggggtgatgacggcgccgacctcttggcgctgttgtgagagtgaagtgggcgcgtggttagacgccagccacagttgtctttgggttatgtcgtcatgaagccggcgctctacagttgtgtaaccttgaacaaatgggttcagtatcttggaatttcagttttgtcatcgtttaaaaaatagatctggaaaaatgtgaacgcacaccgtgcatagtggtgaagactgaacgagctgataaagtttttaccattgttttatgaggattttatttacagagtaattgattttcctcgcaggtggcacctggtaaatggttagcccttgcggagaaacaccctgttagttcccagggagagattggcgccctggagagtgattaccagtgtgcctttccattatggtgtgtcacaggtgccgcaagataagcctgatttttcatgactgctttttcctgcccttctgtgccctcaggacactgcccatctctaagataagagcctggaaagaggactctgttggctgttggaaattgcagagtaatgcctcaggtaggtcggtgtgtccgcaaatcttcctgaaacactttatcaggactgtgtgtttgctttgcttctcctgcctgttcccacctaaccaagtccatttaagggactggatccatggttcctttcagtataggaaggacggagcccacaggagagctccaaggtattatcctcctcacccagtgttcctcttttctacagttttctgctagaagactttctagtcttgccaacattttaaaactgtaattcacaatgcaactttggaatgtaaggttattcggtttatggttgtcaaaactgtaccatgtggtctcaagtgaagagatgcttgcagtcatccttgattcttccctttgacttatacctatattcagatcctctagttggagctaagctatacactgtatacagaatctgaccattagttaccccagcactaccaccaccactaccaccccggtagtgatagcaataaagccacctggattattgcggtagcctcctagctggattccctgcatctgcccttaaccctcatcagtctgttctcagtacagctgtgaccgtggtcctattgttacataaattcctgtcattcctcaacctataatttttcagtggctctaactgagtcacttctgcaatgacctatttgtacaattaggccattacctttctgatcccaccttccttctctgcctcctcattcctgtgagctctagccactgtcactagttgctgtgccatcgacgtggaatattcttcccccacatacgcacaaacttgcatccttatcttcttcgtgtgtttgttccgtggttactttctcagaaaagcttccctgaatggctatttgcaatcgcagtcaccttccctcgcctagcacttccactcctccatcactgctttgttgttttccacagtgtgtgtcactcactagctgatgtactgtatgttcagtatatgcacatgctcattgtctgttcctggtgggaggaatcttttttcttttttgttgtctgttatagcttcagtacccagagggttacctggcaccaaatagatgcttagtaagtaattgtggagtgaataagatgagtaatgacgaactggtggggcagaatcatggcatggaaggtgaagcttgcataggaggggatgtgagtagcagatgtacatgttgggtgaagtctgttttcttggagaagttagataattagaattgaaaaactggtgtggtggtacatgcctgtttttccagctattcgggagggtgatgagttgagaaaatttcttgaaccctgtggtgtgcggctgcagtg
